United States Patent Application Publication US 2026/0137732 A1 - sequence listing, part 8

SEQ ID NO: 5 - DNA, 2801211 bp, Akkermansia muciniphila (residues 1,400,607-2,801,211 of 2,801,211)
  source 1..2801211: mol_type = genomic DNA
cgtccgaagacgaatttgatgagcagggagccgccgttctggatcgtttgcgctggcgctgcgaactggattgcttcgacttgggagaccaggcaaacgccacgaggaatatgatgacgctgatccggacgacggtggatcccgtgcgccgggaacaaggtatccgcaccctccgggataaactggttcagagcatgaagagcttgatggattctccggaagaagaaagcatggctgacggttcctcttcatcctctgcaccgcgtcctgccatgcgttcctccaaaaagaaggctccctccaccacgattacgaccagccgtgaaatggatgatcccggagccatcggaactgatgtgccgaagcctcccaagccggccccagcccggagtgacgatttttttgaagacatctgactttcttcagacaaaagatgttgcccgaacggcggtttccctgttcatggaatgcgcagagcatccttgacgtccggagccgccgttttatacattaagggcatgtatcagccatttcaatttttcatgcccgcgcaaatcttttttggcgcgggttctttggacaatcttggttccgctcccctgcccggcaccaaggccctgatcgtcatcggcgggtcgtccgtcaaacgcctcgggtatctggaccgcgtacaggctcttctgaaaaaacagggagtggaaagcgttgttttcgataaagtgcagcccaaccccgtggtggagcacgtaatggaagcctcctccctggccagggaaacgggctgtgatttcgtcatcggcctgggcgggggcagcagcatggattccgccaagagcatcgccgtgatggcggccaatccaggaacctactgggattacatccagggaggttccggcaaggggcttcccattccctgcaaacctcttcccatcgtctgcatcaccactacggcgggaaccggaacggaggcggatccgtggaccgtcatcacgaaagaggacacgcaggagaagatcggtttcgggttcaagggtactttccccaccatgtctatcgtagatccggagttgatgctttccgtacctcccaaattaacggcataccaggggtttgacgctttgttccatgccgtggagggatatatggctacaatcgcctcccccatgggggacatgttcgcgctccaggctattgaatacattgccaaatatcttccgcgcgccgtaaataacggggatgatctggaagcgcgcgcctatgtggcgctggccaatacctattccgggtttgtggaaaccatttcctgctgtacgtcggaacattccattgaacatgccctcagcgccttccatccttccctgccccatggcgcggggctaattatgatttcctgggcctaccatgaagcctatgctccctcctgcccggaacgttacgcaagagttgccgcagccatgggacaggaagcctccgtggacggtttcctgaacggcttgaacagcctgaaggaagcctgcggcgtagacaagctgaagatgtccgaattcggcattacaccggatttatttgacgaatacgccaaaacggctttttccaccatgggcaatctgtttgagctgactgttgcaagttgactccggcggacgtggtcagcatcctggagaaatcctattcctaggaacaaacttccggggctatcgcccgcagggaatatccctgcgggcgcgagagatttagctcagccgcggcattaccaagacgaacgcggcgcgtatgattccgatttcctctacgcttgcggagcagctgaactatttcaaagcagaggtttttcctgcaggagatctgatgagccaatggttcctctttgataatagccttgcgtgtggaatctccgggtatcaagccttcagcccccctttatcagatggtggaaatccattgtcgtttgtctctcacgcgttgccgcatagtcgttgataatttgttgagagctcacttgtccaaaaaagcagcaatagaatcctgctcagacttacagggaaacgggaattccatattggcttaacatgttgcctgagatttcaaaaaaggtagaaccagatgcaatcctttcggatttctccttaatcatttctcccataaaataaatgaaataagaatttgccctactcgtaagtaaagagtagggctgtatgagctgtcagaattctaacagagcaattttgaagtcctagttgcgtgattcgtctgatactgcgttcaacataccgcgaccctccgtctctgcaggtgcgtaccaatcaatatctccctcccagaatgagggttattcaagggtttccccttggctcttttgcaggaaatctgcatttccgcctcatgtcagcgtaagcatcatgacttacgggaggtcaaaaccgccgtttgtgatgaaatcccggagtattttgtccagtttcatggccactttgggtgggggtaatggagtgtgagacccggtttcgaagtaggctttggcctttttcttatccgctgtagctttcaatgcatcaaagcggccaaaatcgttgatgttcccctcagtcacccgatgagacatcatgccgcgcaacaatgtttcatccagaccaaacacggcggcaaagcggtgtatgcggtcgtcctgggcttttgccatgtactcggtcacatagtcacggaaagtcttgccctctacagggacaacatcaccacgcttaatgtcgtgcaggaaaatatcggcatacttctgctcttcttgggaaaggaacgcaaaggacttatgcagttcctgctccgtctgctgcaattcctcctcggtagcattgcccagtagcttcctaaacttttcaaatcgggagttcatgtaatcattgtcgattgcgccggtggatatcgggatagggaagcccggaatgtcgtaaggtacatctggcacatggccatcgctctcacctccaccgccgccgaacagctcgttgtagcgcacgctgagaacattgaaggtgtgttcatccagagcaacctccatcgtggagtctgcaaactgatagatgcgcttatcccaacggaagccttgaatctttgcggcttccatgcgggcattcaaatcccggaacagccgtgcgaacttcttgcattcttccggctccgcaggcaagtgggagaaatcctcaattccggcctgatgaaacagatcagaaatatcctgatagatagtattgagcaattccaaattcctattcagtttctccacgaacaatcccaaaggtttatcgccggagtacagcttcaccgcctgctgaacgttgcgctccatggtatgcggcttccggtaatagcggatggtgccgaaaggcttatccagaccaaacaggcgattggtgcgggaaaatgcttggatgaggttttcatagtaaagcatcttatccaggtagagcgtgttaatccacttggagtcaaagcccgtgagcatttgatccaccacaatgagcaaatccaactgctgctccggcgatttgtcgatacgctcgtatggccgtttatgcgccaaccttgcagcaatgtcttttttcattccggcaaaggtaggaatcgaaaaatcctgtccgtagcgagcgttgtaatccttgatgatttcaacaagcccttgctctttcatcaggccatggccgttgttgtcgatgttcgcgtcaaagatggcggagattttcaggtgcggggcttctgctttcaggcgccggtagtactggactgcttcctgaatgctggctgtggcaaaaatagcatggaacttgccattatggctcaagactacccaatttttcagaatgtccgcgatgacagcctgttgatgctcctctctttcatattggctgttaggcagataatgctcgatgccgtgcttcgttcccgtttcatcttcatacaccgccggcatgggcaaccccatgtagtgctgaaacacggcggctttcgccggggctgcgtaggcttcctctactgtgtgcgctttcgctttttccaaggcaacagccgttttcagctcgctgtcctcataggttaagaccttgtaggggtcaaagcccaggacattcttatcccgaattccatcggcaatactgtagcggtgcagctcatctccgaaaaccgtcgtcgtcgtattgtctttcttttggttttcctcatgtatgggagttccgctaaaaccaaagaatatggctcgcgggaaggtggctttgatgttgatgagcatatcaccgaacgtggaacgatggcattcatccacaatgaacacgatgcgctttccgctcatcagttcgatgtcagccgctttcagtccgccctctgcctcattcttaatgttgttcatcttctgaatggaggtaacaatgagcgtatcggaagggttgccgcttttcagttttgtaacaagttcgcccgtgttttccgttgcctgaacatccagactgtcatcggcaaagccccggtattctttcaggctttgcgttcccagttctattctgtccatcaggaagataaccttgtccgcgtctttggacgtggctatcaactgggcagacttgaaagaggtcattgttttgcctgaacccgtggtgtgccacacaaaaccgccaagctggttcctctcgtcccattttgtttgagctaccttatccgaaattttgctggcggcaaaaaactgatagctgcgcatgactttcaacactccgtccgaattgtcggcaacagtatagaagcctatcatctggtgcgccatggggattgacaacagggtggaaataacgcttttccagtcattaacaggctcgttatccacatcagcccaatggaaatagtaatccggattaaagcgcccgtctattccgggattggcgaaatacagcgtttcttccggtgtcatgccaacaaatatctgcacaagcgagaacagcccgctaaagacgccctctgccgtgtatttctctatctgacggcaggcctgactcaccggaacgccgctctttttcagctcaatatgaatcacgggcatgccgttaatcaacagcatcaaatccccgcgcctattattgagcaagggggatgccgtgggaaacttgggctgctgcacaatctggtatcggctttgcccagcggctatttccctgcggtcataaatcttgagggaaacctccttgccgtagtgtaaggtatcagcctcgttatcgcgcgtaatcgtcacgttttggccgttgataaaaccgttcagcttcaacggcgatttgagcatggcgatctgctccagaatttgcagcatttcaccctccgttaaaggacaattattcaggctgtctatgtcccggttgttctcgaacaggatgtcagcccagttttggataagctgcttttccgtgtagtttttcaatactgcgctttcccatccgtgttcggacaacatcttaatgacggcttcctcaaaggcgctttccgttgtaaaagtcataaaatctcctttcaattaaacaaacattttttccagacaggctttcttgatgttttgcagtttttccaacttacgctgatgaagggtgatgaggtggtcgatgttcctaaaaaatatggcaattaacttttgctctcgatgggaaggaaaacatccatacctttcaatcaatatcgtgtaatgccgcttatatccttcagggattggtttgtatcgctccaagaggaaataaaaaaaatctccatctagaactcttgctgtaaggagtcttgtgccatcagtggctacaaaaaagggcttttgtggtttgtagattgaaactgtatggtctccgaaaatcgttatctttgcataatcttcacaagggattccgtttccatatccaataataggctcacttccttgttggataatttcgaattttccgtcaggttcaggtgatgctatatactgcttaaacggaacagactctaccaaatcccccagcttctgccgttcccatgcgtcagtaaatccggcaaagcgaacttcggggaaaagctcaccatttttcgggaacattttgtccaacatcgattttttgatgttaaggagcttttcatacttacgctgatgaagggtgatgagatggtcgagggaggcaaacaaggaaccgattctttcttgctcttgctcagaggtcgccgcaatatcttgttcttccaaatcgcttttattcagatttcctatagctccatttcctccagcaacgttagtgcggataaacgatgagtaccagggtgcatgcataagagcattaacgaaagcagaatgcgtatacggatgcgcgagcagcatgaacccgccgtgtaccattttacccttatcgtcaataatcaaagcatgctttccgactaatctgcttgagccattagctgcggtaattaaaatgtcgcctttttcaacaagcgggatgcacacagccgtctcttttacataaacatcatcctctgctaaaacgaaagaatcctcatctatatttgacgagcgcaataccctgattccagatgttgatatatctcttggtgaataggttagccctcttctaaactccgctaaatcccccagcttacgccgttcccatgcgtcagtaaatccggcaaagcggatagacggaatcaacgatttctcattcatgggcgcttcctccgagcagggatttgagttcctgaatgccctgcatatcgaactcgttgccggtcaattcatccaaaagcgatacgagagaggactctgtctcagcgatttggctgtctacctccgtgaatgtcgtttcatatttcccagccaaagcaaggagtcgggcaatgaaatcggcaatgacagcggagggcaacccggccatgctatccagcacgggaggaatccacttgagcttaatcatttgccttgcctgctcatccgtcaattcctcaatggtctttttggtgaggaggtggagcgcggtactgtccgccttgatttgtttcttgagggatttttcctcattattcagggcgttcacctttcgcaggacggcgagcgtttccggctcaacctccatgctcttgatggcctttgcaacctctttcggcacaaaggcgtcgccctcatcattgacaaagggcttgtccttatcctcctcgctcagctcattcagcaaggattcatactctgccgcgagttcactcaagcgggcttccctggcgttcagcctggctaggtctgcggcgagcagggtttgctgcaccagggcaaagggaataatgtgtccaatccagccgtcctgcacctcctgctttttgccgtccttggttttaacgaccatgttggggtcaacctgtttggaagaagcaaagccctcagtcctgataatctccaggtgcacggcaatctttttccactcatcatccagcaactggtaggctttgtatttgtctatcaggggaagcccgttcaggcgagagaaaacatcatcactgatgatggatttttctctggtgatattgagcgtttccataccatcgagcaatcgggtggtgaggaatgcttcaaaatcagcaaaagaggaagcgtagcgagcggtaaatgccgtaacatcagcggcgtcaagaacggacgacttgaggttagccacgttcaagcggcaatgagcctcgccggaagcggtgaacagagcatctttcagatgagggaatgctgcccagtactcatgaaaatccgccagttcagacaaggggatgccgccaaacatggtagcgaaaatatcccaacgttcgtttttgtctgaggaatcgacatagcgcggtatattgaggttatagtcattgccccggatttcatcaaggcttaccaccttggcgaacttctccacatcggcgcgggcagaaaccacatccacaatcttcttgatgtcgcacgcgcggaggacattgttcttgcccaccttggcaaagcccttggacgcatccacaatcagcacatccgtattttcccgtttctgcttgagcaccataatgatggtgggaataccggtgccaaagaaaatgttggcaggcaagccgatgatagcgtcaatatggttgtattccaccagattcctgcggatagccccctccgtaccgccacggaacaggacgccatggggcagtacaatcgtcatgatgccgtcaggcttgaggtggtataggtcatgcagcaggaatgcatagtcagccttgcctttcggggcaagcccaaagcggtaacgcgggtcgctttccttgtctgcgggattccacgattgggaatagggagggttggagacaacagcatctacatagagcgggtcataggtgttaaccgggtcgttatcatcaaaatacggccaatcttcctccagcgtgtcgccgttgcgcgtcacgatattgttcggcaaaatcccccgcattaccagattcatgcgggtcaggttgtaggtgttttccttaagctcctgagcgtagtatttgatgttgtctcccccgcccatgtaacgcgccacgcacttgccgatattgataagcagggagcctgaaccgctggtggggtcataaatcttgatttgctgcctgtctttaaggtgggcagccacgatttccgacatgaggagcgaaacctcatgcggggtgtagaattcgcccgctttcttgcccgcgtttgcagcaaagttgctgatgaggtattcgtagataaaccccaggacatcataatcctgccgcccatccatggggatatccttgatgagatgcaagaggtcgcggatggctttggtgcgggcaccggagttttccccaagtttggagaggcctgtttccaaggtggcgaacaccttgtcaaagacctttttgtgagagggattgatcaggcggctgaaagcagaaagagcctccgtcacatcagcggcgttgaagtcgctgcccttgtcaatccatgtagaaaagaggtgtttataggagatgaagtaacctacattgctgcggatatagtcaaccgtctccgcgtcatcttccgtaacatggggcaaatcatcgtctgtccagtcgttctctttcaggaacttgacttccttgtcggaaaggaacttgtagaagatgaagccgagaatgtagtccttgtattcattggcttcaattttggagcgcattttgttggcagactcccaaatcttcgatgcaagctgttgtttgttcatagacagggttgaacagtatacacatatcttcccaaaagtccagcgacaggcccatcagcaattccattttttccgcttgcagcgtggtctttcctcattcgttctgcgtcaaggaagcatcgagcctcgttaccaccgaattgacagcgtttaaaccacccctgaaaaacagcgcggctgccgggtttccatgttttttctttaccgggcggacagatagcccaggccaatggcaaggagccccccggcaaagctgatgagagtgtaaaggaagaaggcggagaagttcccttccttcaacaacaggaaggattcattcatcagcgtggaaaaggtggtgaaaccgccgcacaggcctgcggtaagaaagagccgcgtttccgtatgcaccaggctccggtcgaacaaaccgtagaggcagcccaggataaaacatcccagcaggttgactgccgccgtgccccaggggaacgaacttgccgaagtgacctggacgaaccgggccagcaggaaacgcaatacaccgcccgcaaagcttcccaggcccactatcatcagcattttcatcatatagcggctttttctatgttttaatggggaataaagtttcggagcagctgccgaaatccgccgggaaagacggactgcggcttcttgtccatgaaagggttgctggctgcgttcccgaaaactggtttggaaacgttcgtgtcgcctggtgacgccctttaaccggaaacaagacttctggcctgtatgccggcagaacctatttcttttaagcgtgtgcgggtaaaataccctgttttttccatatcgccagcctttttgttcttgattgcagggtaaaaccgtatttccttttttccatgtccctgccccttctcgttaccggaaccatcggaattgataccatcctgactcccggcggcagggcggacggcgttctgggaggttccgtttcctttgcggccgtggccgcccttttgtttgccgaccgcgtggatgccgtcagcatcatcggagaggattttcccgcccattatgaagcggcccttgaggccaaaggggtgtgcatgaaaggagtagaacgcaagaaggggccttcttttgcctggaccggggaatattttgacaatatgaacaagcggagaaccgtttgtgccaatgatgccgtgatgctggaatggaatgtgcacgttccggagcctttgaggaaccatccggtgctggtttgctgctgcatggttccggcccagcagcttaagtgcatggaacaatgtccggacgcggcgctggtgctttccgattccatggacaagtggctgcgccgccagccggaattactggatgccgtgatcagccgttcccatatcaccatgatgaatgaggatgaggcgaaggaatatgcccaggcgtccaccgtcatggaagccggggaattcctgctttccaaaggcgccgcatacgcagtggtgaaacagggggaatacggggccactcttctgggacgggatgccggcgggaatctccggattttccgttgtcccgcctatcccctgaaaacgctggtggacccaaccggcgcgggggatacgttcctgggggctctggccggctatttgtccaccctgcctcccggccttcctccgtttgaggaagtgaagagggggattgtgtacgggacggtggcggcctccttcacctgcgagtccttttcggcagacgcccttctttccatgacaaaagagacctttcgccgccgtcttgaagagtatgcggagatgtgccgactgccagacatccggctctcttccgcaagtgcctgttaagaaggaatcagacctcctgaaaaagaggggatgccgcctttgatggttcgttttccggtttccgtttatgcggactgtccggaatttccaggtaaaaaaggcccggacgcggaacatgaaaaaccccggcgtggcttgcacggccggggtttccgtaaaaacaggggatgcagtcggcaggatcaagcatcctgaaggccgaatttaagctcggcttccgaaaccacctggccgttcaccagacaacgagccgtcgcctggccgatgtttccgcgcatcttggtcagttccgcttcaatgatgagcgtatcgccgggaaccacgacgcggcggaatttaaccttgtccgcactcatgaagtagccgagcttgctggcattgccgggctggcgcagcatgacgatggaggctacctgggccatggcttccacctggagaacgcccggcatgaccggatgtcccgggaagtggccctggaaaaagagttcattcatggtcaggttcttcaatccccggcacttggtttctccttcaaaaccgataatgcggtccaccatcaggaagggatagcggtgcggcagaaggctcatcacttcgttgatgtccagcacggcgtctccgtatggaacattgacgggattgggggccatctgctggttgcggtggtgttcctttttgagcttggccgtaagttcggtgttcgggccgtggcccggcttgatggcgatgacgtggcccaggatgggtttgccgcacagggtcaggtctccaataaggtccatggccttgtggcgggcaaattcattgatgaaacgcatgggctccttgctcatgagctcctcgccgcggatgaccacggcgttttccaggctgccgcccttgatgaggcccttctccagcaggggcttgatgtcttcgtagaacgtaaaagtgcgagccggggccagttccttttcatacgtttccggcgtgataaccgagtcaaagtactgggtaatgcggttttccggccccacgcaggtgacggaaacgcggaattgcttggaggggagaatggtcaggatggaaccgcccttggtttcaatggtaacggcctcgcgcacttccagatagcggcgcggcacatccagttccacgatgccggcgctcttgatcagctctacgtagggggctgaggacccgtccccgatgggcggttcattggcgtccatttcaatgacggcgttgtcaatgcccatgcccgtgagggcggagagaatatgttccacggtatgcactttgacggaaccttcagccaggctggtggcgcgttccacagtctgcaccttttccacgtccgcgctgatgaaaggctggtccggaatgtccacccggcggaatttaatgccgaagtcggcaggagccggcttcagggtcagggtaacgggctgtcccgtatgcaaagaggtaccggccagggaggccggagagccgacagttctttggtttccacatgccatgcggggatgctagtgaatgagcttccgtttggaaagcacgaaatcacggattttcctttaaattcggggaagaggcggcatgccggcgtgtcatcccggaaagaagaggataaagggcgcttgaaaaaaagccgctcacccagtagtgatgttccatgcatatcacagcaggcctccgcatttcccgtgcgtttattctcggcgccgggctgggtacccgcctgcgccctctcaccggcattctgcccaagccgctgattccctttttccatgagccccttattctgcattccatgcgccgatgctacgattgcggcatacgggagttcatcatcaacacccaccatctggcggcagcctgggacaaggtgttccctgaacattcatggaacggctgccccgttcatttcagccatgaacccgtgctgctggattccggcggcggcgtcaaaaagatagagcccctggcttccgcggaagaaccgctgctggtggtgaacggagacatggcggccacatttgacctgggccgcctgctggaggagcatttgagccgccgccctcccgtaacgctggccctccgcacttccggagacaagaagaacgtgggatttgatttttcttccggcctggtgacggatatgaggcacgccttgggccgcgaccccggatcctgccaattcaccggcgcgtactgtatggagccggaaatattccgacgcatcccttccggggaagccgtttccattattcccctgtttctggattatatccgggaaggatgcctgcgcggcattctggcggacgacgggttgtggatggacatgggaacaccggaggcctatcttcaagcccatctggatttcccatcccccgctccgcgcatccacccccgggccagagtgtccccccgcgcctttgtggacagccattgcgtgataggccccggagctgcggtagaggacggttgccgcctgcaaggctgcgttgtctggccgggcgtatgcgtgccttccggcacttgcgcggaacgccggattttctattgttcccccaccgattactgacgatgctttttctgcgcctgcttcccctgatattgtgcttttccggcctggttcacgcagaacaccgcgtcttcaccaggaaggacggatttttgtccatgcgggacaagctgaacgtgtattttttccgttctgatacgcaccgcctgctggtaagggatgaagggagcgtcaaaacgccccggtacggctccctggacaaggccatgaggaaaagcccctgcgtggccggagtcaacggaggattcttcagcgcagacgcggggggaactcccctgggcctggtcgtccaggacggcaaacggctttctccgctggccacgggatccttcgctgtttccggtgtcgtttacgaaggaggcagagacggattaaccctgatccgcagttccgtgctgaggcgcatgagaagactgccggccatgcaggcggctatccaaggggggccctttctggtggagaacggctccgccgtaaaagggcttaacgcgcagaagtccacctaccgcaccttcattgccacggacggcggcaggaggtggtgcatcggcgtttcctcctccctgactctgaaggagctggcagcctggctggcggctcccggggcattgggggatttccgggtggaaacggccctgaacctggacggcggctcttcttccgccttctggtgccatgaaacaggcatttcctaccctgcgttcaaacaagtcaggaattatctgggcgtagcccccgtggaacaccggtaaactccgttctccacggggccatggacgcgtttccctgcgcctatcctgcgcagcaacagagccgcgaacaccaggaaacaaaccaggacggcccagtcgcccagcatggcgtacagggttattttcgtacagcccacaggcaatgtggcagccatcacccctctggtaaacggtgaaccggaggaatcccgcaaatccgcaataaccgcgccgttgggggccagagccacgcttacgccggtattggcggcacggaccatggcacggcgcagctcaatacaccggaacgccgcattgcgccaatgctgttcgttggcgcaggaacggttgaaccacccgtcattggtcacgttcaccatcaactggggctcctgccggatgaagcggcgcacccagcttcccacaacatcttcaaagcagacaagagggatgacccccaccgtaacggagcttccgggacggatgggcacgggaacggggctggaggaacacccgggcgtataattcagtcccatggcggttccggcggaagcctcgaaggctttttccagaaatgggaatgttttccgcatagggatgtattcgccgaaggggaccagcatggccttggcgtgcagccgggctgtggaataatccccctcaaagacggtaagacagttgtaagcccgcgccacacgcccttcatcagacagatagatatcatccgtgcccgtcagcagaataaaattgcatatcccgttccggagagcctggacgtaatcttcttccgcgctcagaaagttgacattgtcctggttggagaagcgttctcccgtggcatcacggtaaaacgtggaaatggggaaggaactttccggccagattacccaggccggcatatccagggaggcttccgcgccgtctttgaccgcctgttccagagcgcggttttgaagatccagcattccctgttccgtcatgtccagcaaagcccggtaaatgttcctccggttggccgggtcccatttttccttctggctcagattcagctgcacggccatgacgggaacggtgaatctgccgtcgcccgtggcttcggcagactgggcggagtaacgggccgtccagaccacgccagtgacaaacatggttaaaagaaccgccaccagtatgaaaaaatcccagggaacagtacgcctgccttcatggataatcatggttccggcccggcggcaaacgcgccagagccagacggaaaaaacggccggaataaaagccagcgccgttactccaaggtattccgcccactgggccagaggattgccgtaaagggccacgcccagattgttccagccgaagcccggtatcagccagccccgcccccattccagacatacccataaagcggcgcccgccagagcggcggaggcgctgggcagtatgtcgcccagggcccaggttttccaggcggcccggcgttcctttgccgtcagcctcgcatcgggcagcggccgggcgtccggacggaagaacactcccatgaccagagcccagaggccgggaaacaggcctccgtaaaaaatcatcaggggaatatagcccagcgtgctgacttcattgacccaccagaaggaaatgccgtaaaatactaccccaaacatccagccatacagggcgtatgccagcattccccttttcccctcccgcctgcggccgtaccacagggctgtcagcaaaggcaggaaccctatccatacgcatccgccccagtccaccgggataaaggcgcaggccgtcagaattccggaaaaagcggccagcagcagacctgcccacacgggcaggagacgagggagggaagcaggtgggatattcatcgtgaaaagccttttattccgggaacgggaatgccgccattgtcccccatgctgactcattcctgcaacaaaaaagattgcaaaatttactcaaatgcggaaatagtgggcgcagttcatacaacccatcatacacaatggcagatatcgacgaaaaaacacctctaaacgtccccggcaaattttacgtggacagttcctgcattgactgcgacctttgccgcgaaacggctccggaaaactttggacgggatgacgatgaaggagtatcctatgtcaagaagcagccggacaacgacgaagagctgagcgcctgtgaggaagccctggaaggctgccccgtggaagcgattggcgacgacggcgaataatatttctccatatattattttaaccgcccggggctgttggcattcaacgctccgggcttttattttcccccatgtcctccccctggtttccctacacgccggacagagaccgtccggatccccacgcctcccccgtccggtatgattatctttcccgtgacgagcaggaggtgaggcaggcgctggcggactggttccagatatcccccgccaccagtgaaacacgtaacctccatacggcggaatccctgctgggggatattctgtccaggcttcccctggacggcgacgggatggatcccgaattgctcagggaaggatggctgaaagctgcggggccattcctgggccagcaatccaaccttctttccattgtcaagggagtggccaccatccaggtgcttcaaccggccatgcgctaccatctccagcagtggcagggagccctgctgggaaaactgaaggaccagttcggcaaggacgccgttcattccatccgcatacggataggataatcttacactctgaggaatgcccccttttgccggtttccgcgaaagattatttattatccacgtgtaatatttgccatgcgattatccctttccacgcctttgctggcttccggcctgatgctttgttttacctcctcccatggagactgggcatccccgcaccctctccagcaggaaaaagccgctccggtcccactgattcccttcccgtcccaggtggactggaaaacgggaacatgccctaaaaaggctcccgtttctgtgaaaaaaaacgcgtccctgtccaagacgctgggcaaggaagggtatgaactgcggatccgccccaacggcattctgattacggccgctgacgatgcgggtgttttttatgcccgcagaacgctggaccagctgggagccaggggagattacccatgctgcgacatcaaggacagccccgcgttcgccatccggtgcttcatgcatgacgcaggccgccatttccggcctgttgaaacactcaaggcggatattgatgaaatggcccggctgaaaataaacgcttttcactggcatctgacggattaccccgcatggcgcatccagtgcaaaaagtaccctgttttgaatgctccttccaagaggattcagggacgggacgttaacggcacctactcctacgaccagatacgggacttattccgctacgccagggagcgccatgtccagattattccggaaatcgatatgcccgggcacagcacctattttaaaaactgctttggcttcccgatgcatgatcccagaggcatcaacattctggaagaactgctggaagaattttgcagggaaattccggcggaaatgtctccctaccttcatatcggagcggatgaaatccgcattcccaacggaaagcagtttgcggaccggatggcggccaaggtcaaatccctgggacggcaacccatccaatgggcgggcaacaatgacctgcctgtgtccggagacagttatgcccagctgtggaatgacgaaaattccgtaggcctgccggatccagccaggcagaagaatccctacttcgactccacggcaggatacgtcaattcctttgaccccggcattctggtgcgcaggaatttcttccgccagccctgcggaacagccaggggaaacaaccattccctgggcgtcatccagtgtctatggccggatacccgggtggagaacaaaaaaaacattcctgtccagagcccccagtggcctgccatgttcgccatggcggaacgcagttggaaaggaattccagaggatggttcccgttttgccggcagtctgccggaaaagaacacggaggcttatcaggccttctctctgtttgaaaaacgcatggaagccctggccggaagcaggcctttcccttactggagggattctttcgtggaatggacggtgttcggccccgttccgcaggacaggcaggaagaagtaagaaataacctgctggcgggcaaatctcccgcaggactgtctcccgtccagacgcgcggaggcaatttgtatttccgaacccgtgcgggtgcggaaggcctgtttcccaagacaaaaccagggaatacggcctgggcggagacgacgtttcactcacccgtggagggcatcatgcacgctatggtggggtttgacgctccggcccgttccacacggcgctgttccggagtaccggctgccggggagtggtcccagtgcggcaccagaatatgggtaaacggcaaggaaatgaaaaatccccagacttacaaactggcaggccaacggcgttacgaaaagcatacatggaattcgcccgctaatgagataccctttgacaacgaggaattctggtgggcccggcctcctgttccctttcaagtgaaggccggggaaaacaggatcctgatagaacaaccgtacacaggagaattccagtcgtggggagtcagcttcattccggtgaaaaaagcgggagaccgctggattgccgacccaagctattatgccaaacccaggagagggaaacaggatgacgtctctccggtgccataaaagtaaacatggaatactcccggcggagctttccgtccgttgttccaaaggtcattttcccccgctcatcaggacgagggaacgggggaaatagcgtttgaggaatacgtaaacgctccgcgccatcatgtaaaccgcgggaaccaggcaccaccacgcccaggcaggccatggggagggaaaacagctctctacgcccatcagggctattagaacaaagatatgggaacaatacacgaaaaagctgccggacgcccaccgggccagcttttccgaccagccggggctgacggcctttacaataattccgaagctgaggaaggccagaacaatcaatccgggaaaagagtcgtccgcaatcaggaaagagtccgtacagcttacccagacaagacccacggaggctaaaagaatggaaccatgcacggcaaggggcatgttgccccagcggttcagacagcccggtgcggcggacgccagcataacgccgagcgcaaaatccccaaacatgtacggactgggccatgccagggagtcgtcccaccggtgcagaaacaggcaaaacaggccaaaggcgtaaagagctggacggaaacgggagagcaaaaacgcagccagggtaaacatcatcaagtctctcaggaaccacatcggggtcagcatgggacatgttcccagcccaaacacggaagccagagaaccagaggcaagaggcatgcccgccgccagccaataggccgcgcaccagaaaagataaggccgcagcaaaaccagcaggcggcgccccgcccacgttccggccccctgttcatcaaggccggaggcggaaaaataccccgccagcaggaaaaacgtcgccagcgccggaccaatcagccattggttgggaggaaaccccatggaagggacgtgctgcatgataaccaccagcgtcgccagcagccgtgcaatctccacccagggcaaacgagggtgaatttctttaccggacgcgggggagacggtcatgacagccccattctggatgattgttttgaaaaagcactattttttattgattttatagacgaaaagcggccttatcaaccttcacaggcatcgtattatggaaaatacctgaaaatgatttttttctcatattttcatttatggctttatatttccatatgggaaataacacgcattccgagcgcaaggctgcatcaatacacactcccgcactggatattcccggattttgccgaaacagctgctgccatattgcaggtgctcccggatggttctcccattgcaattccgtattttccattcatcaatgccgtatgtcgcgaacgcctccccttccctgcccgatgattcgtaaaatcatcagcggctcctttggggaatcagggctgaagccgccgcaaggacctgaaggcccacaaaaaggaaaaaccagaaccagccgccttccacaaaaccgtaagagtgcaggccaatccccatgaggttgacaccgaaccacccccaggctgccacgatatttccgagcgaggcaagaacgaggaagccttgacaggaacagacgtgtaaaagtcgggcatggagggagcaggagcaccaaaggagtgtcattaacgcaccgttttctttagggtcccacccccagaaccgtccccagctcatgtcggcccagatgccgccgagcattgtccccagaaaacagaagaagagcgccacgagaaggatgcgatagactccgcaggccccggctttcagccccttttcaccctgtccgaagaaacgggccaccagatgatatgaggctaaaaacccggcaaaaaaaacacttccgtagcctatcatgatggtcattacgtgcatggtgagccagaaattcgaattgagaacggcacgcatcatgcccatggtatcgccgctgtagggcaaattcatggctaccaagagtgatagaaggccggaagcgcaggcgaccgcggcaacaggaagctgacggcggaggatataaagcgtcccgccgaataatgaggctaccgcgcccgcaaagacgaccgaggaatacaaattggtaaccggggggcgcgattgaatgtacatgcgggccgtaatgccgaataaatgccataataccgccatacacaggaaaaccgtcgcaaaatgcagcaatgccttccgccgcttgagaaacagagagaccacgaaacaaatcaacgacatgccgtagagaaggaagcctccaaagaagggttcgagagcattgatgcaatgctcgaaatgcagtttgaaagaatccatgggcagtattgactccaattccccagaaagttgacgcagagtctctgccgcagtagattcatctccggcagcataggcatcgcaggctgcggcataggctttcagggcggtccgcccggcgggactgagatttttttcgagcagagcggcagccggggtcaggtagcttccctcatgagggattactcgcagggccacattcggatccgcttcttctacctgcacaagagcctggaggaattgaaaatagcgattggcacggtagagccggtcaagcgagggatggcgtttttcacgttcagcggcttcaagctctgctgaggcttcggtcatagcttcatgccatgcatcaagcgtccccaaacagcccgatgtcccctccaggcggagagcgagcgcaacgccggcctgctcataaacggcgagtgctcccagtacggcttccgcggcatgggcctgaggagaatttccccgcagagagccgcgcagcaggccagccttctcaactgcatcggcataggaaaaataacggcctcgtccgccaaggaattcgaccatatccctgttatccgaacgcagaaaaggttcgccggccatttttgccgggcaggcgtttaatgccagcaaccacttcaccggcccggtccgagagcctccaagattcaccgacgtgcggccgcttgccaatttaagggaatccgccgctgcgcttgaaaccggcatcactcgtccagccttcaggcatggcagcgcgccgggtgagggcgcccctatgctgtcaaatgaggaaaaagaaccaacaatcctctgaaacagaggcgataacgcaatcgcaagagcaacgaaaaacgccgtaaataaagtaattttacactgcatgtttttttcgggcacgcaaggttgggagaaaaatcagcagcatgcccgcaaatacgccaggcaccgatatccacggaaaaaagcgcaccggattgcgtacggctgtgattacactcgtgcggcccccattggcgtaactgctctggtaaaaaatccagccgccaaaggagaccggagcattcatgcggataaccgtttccgtgctttccccgccgcgcatgaagcaaacctcgcttgaaaagctgctggggatatcgcttcccgtccatgtccgggtatcaaattttttcagctttactgaaaaaccaagggggatattttttctcccattcccttcgcctgccagtatttcgtgtgagacctcacctgcatccagaacgagtattccctccgtacgcagaaaatactgcaacgcccccgccaaaatcagcactaccagaaaagcatgcgtgaggatcacgcccacgccgcgcagtgtgaagcgcgcacgccggaaaacagacgccgaaatattcagtacggccaatgcccctacgccggcgccgccaatcagaggaatcctcccgaaggaaaggcaaccccagctttcaaaatacctggcctgcacagcggaaacaccgacagaccgcgcctcaagagtgccgagaaaaatgagcagcacggcgtaagccatcagtgcacacgcgagacggggagatgccatccactgcaaaattttcttcatcagcagatactgaatgaaaaagggccgcacgcctctgccgctccaaccgggaaacggaagtatagggtcgtgcggcctgcttcgtgatgaataaagacggaataattattttttgtccgtgaaggcagcttccacttcagagatcatcttgttcagagaaatgatgccgccgccggaaagataccatacctgcgggtcaagcaggatgatggcgccgtttttagccgccttcgttttgttcacaagcacattgttgaggacattcggatttttggccgagcggccgatagctaccgaacggtgcaccacaaagatgatatcgggattgagcatggcaatgtattcataagtcacctgctgcccatgaacccccaccttgatgtttttatcggcctgggccacccccagggcatcgtgcaccaacccgaagcgggaacccgaaccgtaagcgcttaccttgccgtcgttcgtgaggagaacgagagctttcttgccgctggcctgagccttgtccttcgtacgggttacggcttcatcaatgtttttgacggcttcggctgccttttcgggcacgccgaacacatcacccagaagcctgatatttttcttggcttcccccagctgatccttggccagaatatcgaccaggtaaacgggggcgatagaggaaagtttttgataataatcctgctgacgtcctgaaataataatcaagtccggcttgaacgcattgatggtttcaatattgaattccttgaccgttccaagatccgtatattgttctccagagaatttggaaaggtaaggaggaaggaattttttgggtaaagccagcgcgggagtgacgcccagttcaccgatggtctcaagcgaaccgtagtccagcacggcgacacgtttcggattgaccggaagctcgaccgtgcccagcgtgtgcgtggcggtgatcgttttggcttcatctgcggcggccatggaaagaccgggaagaatcaatgcggccagaaatgcggtgattgttgttctcatattatttgttgttgtttgttgttttgggaatttaaggaaattctattcatagtatacgcatatctttttatcaccatagggttctatggcgatatccataccgtaaatatcgcgcagcacatctgtccggatgatatcttccgtcggcccttgatggcacaggactccgtccctgaatgccaccacgtaatccgtatagaaagagacaaagttaatatcatgaattacgatgcagatcgtcttgccctgctcccgcaccagggaacgcaacagtttcattatgcgcgccgcacgatgcatatcaaggttgttcaaaggttcatcgagaaagatgtacttcgtgtcctgtgcaatggccatggcaatataggccatctgcctctggccgcccgaaagctcatcaaggtagcaatggcgcaaatcggaaatctcggtaagttccaaagccttttcgatttgcagaaaatcctgattttccaggcggccgcgggaatgagggaaacgtccgaagcgaaccagttcctcgaccgtgagccgcgccggagtatggagggtttgccccaggatggtgagggttttggcaagctcccgggaatcccatttcctgagttccctgccatcaatggatacagagccttcggtgggttccagaaggcggctgataatgttgagcatcgtgctctttccggcgccattgctgccgatgaaggccaccatccgatcagagggaagcctcgtgctgacgtgcctgagcacgaaggtttcacggtattttttggaaatgtctcgtatctcaatcatatacgtttaattttcatgatcaggtagataaagtaaaccccgccaacgaaattgatgattacgctcaggggcacggagaagttgagccaccgttcggtaagcagcatgccgaaagtcaatgcggctacgcccacgagagccgtgccgggcatgaggacgatgtggcggtaggtcgggaatatgaagcgtgcaatgcttacgatgagaatgcccaggaaagtcaccggccctacgagcaccgtcgaggccgaggccagaatagagacgatcatcagggagcgcagcaccacccatttgtagtttacgcccagcgtaatggccgtggagcggcccagcgtaagcacgtcgagcttcctgaggtcgcaaaccagccagatgaccgccgcggcgatcacaagccccgccgtaagcagcagttcttcattgatgcggttgaaactggcgaaaaggcgcccctcaagtatggcaaattcgctcggatctatcagcacctgcatgaaattcgacaagcctccgaaggttatgccgaagatcatgcctaccaacaccacaaaataaatattgccgccattctgtccacggaacatgtagaaaaaaatacccgtagatacgcagaccatcagcagcagggctcccatgaaacagagcgggctctgcatggtcgtcaactgtgtgctgcccacgaagtagagcacgagcgtctgcagtaatacgtagaggttatccagccccatcacgctgggcgtgaggatatagttggttgtgatcgtctggaagacgactgaagacagccccacggccgttcctaccagcaccagcgcaataacgatgggaatgcggcgggccatgttaaagtcccacgtttcgggtgtcatcccctgaaagacatatacgagcgccagtcccacgcagagcagtcccagaatcaggaaggccgggaacgcgcgacgccggccggcagcattgcggaaggcatcatctttttgatgttgaatggaatcaggcatacgtttttctatggaagagcatggacagaaatacaacaccgccgaccacgctcaggataacgccgatggggatttcgaagggggcgataagcatgcgccctgccacgtcgcaaacaagaacaagcatggcccccagccaagccgtatcaaacaagattttcttcacggcatccccccggaaaatgctcacgatattgggcacgatcaacccgatgaaggggaggtagcctacctccacaatcgtgattgagctgatgatggatacaatcaccagtcccatgcgcatgatgcttgcgtggttcagccccaacgccactgcggcatcacgccccatgccggcaatcgtaaagagatcggcataaacataggccagcagcatcaacgggatgctggcatagagcaattcataattgccctcaatgacaagggagaaactcccctgcagccatgatgccatattctgtacaatatcaaactggtaggcataaaaaacggctccggcattcaccacgccgcccagcatgattcctatcaggggcaccagaatggcattctggttccgcacgcgcgcaatcaccgccagaaagcatgaggtgcctatcagagaaatcacgaaggcggcccccacgcgccaaatgggagaggctccgggcagataaaggatggcgaccattaccccaaagcggcaccactctatcgtgcctgccgtggtcggcgacacgaagcggttattggtgatgcgctgcatgatcaagccgctgatggccatgctgctgcctaccacgagaatgctgcagaggcgcggaatgcggctttgcaacatgatctcccaccagaactgcagctgctcgccatccatccgccacaggtcggacaaggacacttgagctgccccgataaagagcgaataaaaggcaaggccaagcaaaaaactccactgaataattctaaatgccattttctcaggctttcaacacggctgcatcaagttccatttcaaacaacagattgtcccggcacacatcggcctgtatgccgatgcagggcatgatggcgaggccgcggcgcagagctattttttcgtagtgaggggcataatccttgtctttgaaataggctacggaacggacgacatccttccagcccatgccgcgtgatttcaggatggcttcaatcacgtccagcgagagctctgtttgtttgtcgatatcgccgagatgtacggattcgccgccaggggcaatgctggccgtgccggaaacgatgacttgccggaagagagggtggtccacttctaccgcacggctgaatgagctgcggtaatcctgagccgaacattgcagaggcgaagggatatcttttaccgtcacacggtcgcccttaggccgaatggcaaatacgcgggccgacaaggccgcatgttcccgattgccggaaccaatccccgtactggccggaaccagacgatcaaacacgccgcggctttcaaaaaatgtgtcgcgggcgcggttgaactcttcataccagtccagcaggcggttgttgtaaaaccatgtgcggactacgtgggaaaaatccatgccggcccggttcagcgcttcttccatctgccggaatacatccaatgtctgctcagtccgtccggctgtccggtcgcggggcgacaaaccgcccaaaacggcatactcggcatattcatcctcataaaaaaccccggcggtgcggccattgaactcaatcgcccgggcatttacccccttcaccgcgcaaatttgcatgccacgatagaaggatgcgcccgttttcgtacccaaaaaggcagtcatccccgccccgggcaccggggagagatccagatctgcgctgccgtacacttccgggccaatccaccgaagaccgcttttttcagctttttggagtaattcggcatgctcggccaactgcccaggttcgcttccggcaagcgtaatgaattgcagagatgcgccttcgccgcccagcgggagcgacttgacggaaacacctttgtttttttccaagttgcaggtcatgagtatattatttttttaaagtgctttcaggaattgaatcagttggccgcgctcttcgacggagagatggcggaacatttcacgggagaattcgctttcaccgaaatgccacaggatagcctcttcaaagtcgcgtgcacgcaggtcatggaacatatctgtatgattggcggttttgtgcatcagcccccttccccagaggggcggtgtacgccagaaacgagaacgtccgcgattgatttcccccatatcgtgacgcagcatatccgtataggggcggatggtctggtttgcataaccgggaagcggcttatattcccccgttgtccattcaggcttgtggcaaccggcacaccccagtttattaaagagttcctgtccgcggcgcacgtcaggcttgtccaggttgcgggcggcaggcacggccagcccgcgatgccagaccatgaaatcttcatactgctgcattgagagttcctcttcctgcgggccttcaagaccgcttacatcaatgccaagttccttctgtttttcgagccattcgggcgtcatgtaaatgttcggacggtttttgcgcgttacattcgtcacgttccaaagcgcattggcgccaggaccgttttccagtgtggcgcgcgagcagtcccacgtgaacttgccgaggcgccgggtgccgtcgggctcgtcaatccatttgccaggaatccccttcaccgggcctgtcatgctctgctggcgcctgtattcggcaataatatcctcgtcacggatggcatcaagcagccccgttccgtaaatgccgattgttgattcgattgacacgcggtaatcggacggaagcggaagcaatggctcaatcacatctgccgtgggataagtcaacgtgccctccgtcggcttgcccgcattgtagggcgttccgtccgggtatttgtttccgtactggtcaacaaaatcatgccattctattttcactcccttggcataaggcacaaaaggaggaaccgctttcgtctgcagcatgcccgtgtaccccttaaccggggtgccatcgggattatgtacaaaggccagataaccgttgccgtactgcctgtcaaaattgccggtgcgctgtccgcggccataaccggggtggcaggccagacaggatgatttaatgtaagtgggaccgagaccgccgaagcgattgcgcttcacgggtacgaagctcccttcaaaaataatttcgcccgccttgaaacgattcgtcaggccggcttcagtaattgccggcgattcctgctcaaacgctttactggtggcattaaacaccgttcccttttcaccgcccagatagtaagccggcccgggctcgccttctttcgtcctgagcgcggggggcgtgaaatcacggccgcggtttacatggcagctcacgcatgaagctgtcatgtattcggctttgatattgtcaaattttgatgcactcccctgggccggattaatcagtgcgcgtccggaaatgcggggatgtcccaaaacgccggcattccttgccgtgtccgggataaaagattgttcaggagccgcatccccagaatctccggaattcactattgcccaggcggccgctcccgctccgagcaccaggacagccgcaggttttgcaaattgtcgatactccatgtgcattgatgattggcaggctttccagaaatacggcccgtggtacacgtctccgtcagccgtccgacaatatggatattgcagcccagggtcttaccgaccctgggcaatgcgggttaaattacttcacaagaagttcctgaaccttgtcgaagttttcggaaagttccttgcaactgtcgatgattgccttgagctgttcctttttgtcgaggtttttcaccaggggcccctgtatggcgtcgaggctcttgaataccttggcgatagaacctttcacagcctggtcaaccttcgcggacttggcggctacgagaggggaaatcacattgtaggatttttctacgctctgtacgttgtggcgggagtccaccagagaagtgtagctgtaaagggattcacagtcggcggcgtcagccgtttcgtagggcttgcccacctttgaatcggctatttcgtcaataatgtccttgctgccgccgatgatttcatcaagcacttcagagtttgactcgtagcggctgcctgcctggccagcttttttgaattcccccgcataggacttgccgggttctatttcagcttcttcaagaatcttggccttctcttcgctgatcttgtcagaacccgcccaccaggcttcaagcgtgatggcatcctcagcaatcacctcggccacagcggcaaggtaggaaagctgtccgggcgtcagatcggcggccttgcggggctgcccatctcggaacagcaggtattcggcagcatggaaaccgcgcgtttccgcgccgagggaattgcggacgtaggcggcgtcaatcgttacgctcttgctgtccgcgtttttggcgacggcgtcaaggttcgtggtatccaggggccaggagtccagcttcgggtcaaggttggcgaaagcagccggactaaagaggaaggattccgaaagttcccacggcacgcgcgtttcaagaagaagcttccctgcttcagcaaccttggcatcggtaggagcagccttcagctctttagcggccttggcgaatttgagagcgttatcactcatcgtcttgtaggtgggaatgacaagctcatccgcgtaggcggcaatcgccgcgctcgttttgtccaccttgggggaagcggccttggccgcctgagcctggctaccgaaagccaggattgtacttccggcgcaaaagccggccagcaacatgcgtttgtatgcgttcatggttttttattgataatgaaaacatccgtatcctcctcagggaggcatcctccaatccggcaggatttcatggcgtatccgccattttttcccgccggagcggaaaataataatccggccaaacgatgtcaattaaaaattagtttaaactaactttgcgacaaaaaaaccctcttgtggccgcatgccggaacatcggcatgttattgattcggaaatattttctgtttccgaatgcgcccaggagccgcctttcaccaaattccgagtttctccgcgacaaggctccttacctcgccaaaagatttcactgcgggcggattttccgtatggcctccaagaaacttctccatccagatcatatggtaccaacggccgaatttgtatccgcaccgatgaaatttccctgcaaattgataccccaaacgtttatggaactggacgctgtcccgtgtaagataggggtcctcagcttcacagggataagcaatgcacgcgtttaaattcaaaatattctgcatggagagaatcttttccagagctgcatacagttcccttcccgttcccatttttttcatgtcttcccgcacgtataccgtcgtttccacagcccagcgatacgctgcgcggtccgtgaacactcctgcataggcataaccggaaatatcccctgccctttccgcaaccaaataggggtattttcccagtacgtgatctattcttttttcaaactccgtcactgcaggcacttcatattcaaacgtgacagctgtcttttccacatacggagcgtaaatttccagcagcttggccgcatcccgcctcgttgcaattctgattctgctgcttttcatttcggttgaccgtgctgggcccctgagccggaagcgctgccgatcattctaatatttcacaagcgattgtcaatttgaggccgcccaagcacccgccatttccgggaaatatcatccgccgcatgttttccgccgttcccgttcatgaacgggaagaaacggggtcaatattcatttcaaaagcagagtaaaaaccgcattttttaccttgtccggttccccgtgtccatttatggaaagccctcccgaaaaagtgaaaaaaggccggagtccatagagaacccggccttttggaaaggataggatgtcacttcgcggagaaatccgtctcaggagtaaaaaccaatgtccggttcccggtcccgccgcctgcgtttaaaatacggattgcggtagcggtggatgcatttgccggaactcccaggggtataatgaagaggggccgcctccttgatggcttcacggctcaatatctccacaaaatccttcaaggacatttccagatctgcatcgtggcatgccagcgcggcggacaggcgcactttgccgttgtcatagtccacatacatggcgaacagcgtggtctggtacaggtgccacggttccccgcccatttttccggactggtgttggctgatggcctccaacagccacgtcagcgcatgttccagttccagattgtccagaacatcccgtataagagatgtttcgcggccgaaaacggccacgctttcctgttgtcttgccctgttgattttcatgtcttggttctcctttccggtttcccttgttaagcaggacggcggataattctgccgctccaattgttttggacactttttttcaacaggttgttcaatctgaattctcaactgtgtcagccatgaccactttcccaatgtacgggagttcccggtaattcccatccaggtccattccaaaccccaccaggaaatcgtttccctgcgtaaaagccacgtaatcagcctcaaaaggcactttccggcaacagtgcttgtccacggctacagcagtgaggacttccttcacccctcttcttttcaattcccggcaaacttcatccagcgtagcgcccgtatccagaacgtcatccaccaccagaacaggcacatcgggctggaaatccccgcaatccccctcccacgccacggaaccggaatttctcattccggcataactggaaatcttgacggctttcaccgcaggccgggatttcaaatgcttctccaacatcgcagcgaaaggaagagcaccgttcagcagcagcaataaaatatagggttttcctgccatggccctgtcaatggatgcggccagttccctgacgcgcgcgcagatggcatcctctgcaatcaaaggagtgatggtgtaagtcatggaaacggaaatatgatcatattccttagcgagtcaatcaatccttgcaggagaaagatgattccgctaccctcctgggagatgataactattcagaattttcgtatgttcccggggtttcttctggtagtccttcctctgttgtggctggggtcatgcgttttgacatggattatacttttcgttcctttctcccagccgaacattctgggagagagtgtaaaagccgttttttcccttttttctccgtttttcagcgtggctattctggtcatcatgctgaatatatggtttggcagaaggatttatgaagtcagaaacggatggctgcatacagaaaaaaggctattcggcctccgttgggatgcttttgattatgatccggatcttttgtcggaatgctccatggctcatatggatgaacatacgactctgaacgggatggagctggaacgattaaggcatgcgggagccgttatccgacgaaggggaaaaatggggacggaatatcctgcgtcctgctgggtctgccgccttgtttacgacgaacagattctttttttgcttgcttctccttcacagaagcccgttggcaggctggcggagttcatggaaaccgtgatacggacacaccgggaaaaacacacgtaatttgttcacagaccgcttccgcctcgggaagagaaagccagccaagaggttccggttttccatttggagggaacaaatagcggaagaccagatctcccgttccgttccgataggaaataaggcggattttccgtatttctcccccgttccactgcctaaacaggactcccttcccgtcggtggacggctccagggtcagcaggcgcatattcgtcagggcgtacagactggcaccagttctgcccgcgttgatcgcgagaaaaccgaacacaatgaatccggataggcaacacatgcccataacagccagagtaaacagggtttcttccgtccagaccgaggcagatgctattatataaagcccccagccccatgctgcagcaaagaaaacggcaaacagcatccctttccattccctggcagccatcatcctccatccacagcaggatttcccttgccacaggattctttctcctggcagcaggcgttcggacagcctgttccgttcttcccgtgtcaacaattcctgcatgttcatcatccccatctttatatcagtcaataaaccgggattacacttttttcaaggaaaaaccctattatgttttatggtggatgaactgcagcatgggagtattttcccaaaaacaggactggtcttcatagtcaggaggcatcaaaaaagcgctctcaagattgtttctccgccccgatcggcagagaatgtggaggcgcatttaacggtggcttcccgccggaccgcatggtaaagtaaggcagaaatgactgattccccttccaagcgcctttttattctggatggaatggccctggcttacagagcccacttcgcctttttctccaatcccatccgcaattccaagggagtcaatacttccgccgtgtacggcttcgccaatacgctgctgggcattctggagcacgaacgccccacgcacatcgcggcctgtttcgacacttccgctcccacggcgcgccataagctttaccctgcctataaagccaaccgggaatccatgccggaagagttgagcgaccaaatgcccctgattttcggattgctggaggccatgaatattcccattctgcgctatgagggctatgaggcggacgatacgataggcacgctggcacgcatcgcggacggtacggagggattccagacctacatggtttcccaggacaaggacctgggccagcttatttcctccacctgctttctgtggaaacccggcaaaaggggcaatgaccacgaagtgattgacctggcaaagctcaaggagcaatggggcattgaacgtgcggatcaggtagttgatattctggccctgatgggcgacagctccgacaatattccggggcttcccggcgtgggggaaaagacggccaagctgctgatcggagagttcggctccgtggaaaacctgctgtctaatacggataaactgaaagggaagcgcaaacagattgtggaggaaaacggggacatggcaaccctttccaagcaactggccaccattgaccggaacgttcccctgacggtgaccctgcctgaattggttaaaagagaacccagtccggaagaactgcaggcccttctccaggagttggaattccggtccatgcaggccaagctgttcggaaaaaaagcgccggagcccagaaaagcccccctcccggcggacgatttgtttgctcccgctccccggacggaacaacctctgtcggcggaaccctccgcccctgtgtcgggagcacgacaaaacggttcgggacaaatggatttatttgaggaacgccatttgaaaacggtagatgatttcaggcacgaatatattattgcagatacgccggaagcccgttccgccatggcagccgagctggaaaagtatgattcctggtgcttcgacacggaaacgacgggcctgaaccccctcatggacaacctgctgggcgtctccttttgcgctgaaccgcacaaggcatggtacatgcctgtctccggtccggcggatctggaagcggtcaggccgctcctggaaggccccgcagagaagatagggcatcacctgaaatttgacctggaggttttgcgagccaacggcatccatgtcaaaggcccctttttcgatacgttgctggctcatgccctgatcgctccaggcatgaagcacggaatggacgttctggcggaaaatttgctgcaatattccacgattaaactgaaggacattgccgctccgggagcaaaaaaacgggaactggacaccagcggcgttcccgtggaagtaatgggcaaatattcggcggaggatgcggatatcaccctccagctttccgccgtcctgaaaaggcaggtcaaggaaagcggcatggaaaaactgttccgtaccgtggaactgcccctgcttcccgtgctggcggacatggagttttccggcatccgcgtgcttccggaatccctggagaaggcttccgtcaaggtaggagccatcattgacagcctgcgggaaagaattgaagaagccgcaggccatcccctgaatctgaattcccccaagcagctcggagagttcctgttcggagaactggagctggtgaagaagcccaagaagacgaagacgggccagttcgtgacggatgaagacaccctttccgctctggccccccagcatcccattgtagcggatatcctggcctaccgggagaatatgaagctgaagagcacatatctggatgcgctccccaggtatatctgcccgcgggacggacgcatccatacccaattccaccagatgctgaccgcaaccgggaggcttgcctcccaggatcccaatcttcagaatattccggtaaggacggaacaggggcgcctgatccgcaccgcctttgtccccgcctcagaggaatacaccatgctgtctgcggattattcccagattgaactgcgcatcatggcggctctttcaggagaccccgccatgtgcggagcattcagggaaggacgggacatccatacggaaacggccgcccgtgtgtacggcattccccgcgaccaggtggacgccgttatgcgccgtgcggccaaaacggtgaatttcggcattatttacggcatttccgccttcggtctctcccagaggctgggctgcccccgcggagaagccgccactttgattgaaaactattttacccagttccccgtagttaaatccttcatggaagacctggttcacaaagcggaacaagccggttacgcggaaacgctattgggacgacggagaatgattccggaaatcaattccgccaacaagaccattaagtccgccgcggaacgtactgccatcaacacccccatccagggcacggcggcggatatgattaaaatagccatgatccatgtggacaaattgctgaaaggcaccagatcccggcttatcctccaaattcatgatgaattgctggtggacctgcacagggatgagttggctctcattcccaagatagaggaagccatggtcagcgcgctgcccctgcccaacggcgttcccattctggtggaagccaggacgggaggcaactggctggaagcccattaaaaaatattttttcaaaagacttccacgcgttccgcattccagaattcccgcgccttcccgatgccgtattttcccttccggccgtatcgggttccagtttgtggacgagttatccctccagcgggaaatttttgaaaagaatgattccccccgcggcagaaaaatgggtgggaaaggatatccctttgaaaaaatgaattaaagaatcagagcgtcccctgcctggaattccggaacggtcaccagggctctgccgtcttttaacgccactacctgcaccttgcgttcctgcattcctgacggcgtttttacctggatggagctgccgtccctgacggcggaagcgggaatccacgcggaaacgggaacttgaacattgatggctacttgaagagccatgttgacgggagccacttgccactcggaaacatgggaggcattcggctccagggaggcaatcaacacggcggaattgcttttggaatccagcgccgcatccaccgccgtaacgcggcccaaccactgcagccgttttccattattcagcacgcaagaggcggtcagagccgtattcaccttgccctgctcatccctgggcaatgcggaaaattcttccagcggaacgggaatccgtatcatccgctcctgaagaggaattactttccccaccggctgcccggcgaccacgcgggcaccggctcccacagagcattccaccacctggcaggtatagggagcttccagcaccgtatcccggagggcctgttctgcttccgccacatacgcctccgcggcgttcagcctggcgtttacggctctgcgctgcggaacccggagcaccagttcggattcctttccgcttttggagacggagctgtatgtctttttgatggctttcagggcttccgcctgctccgtagaaacatccaggcgggcctgttccagttccgcctgagcgttcgccagtcgggcgcggtattcaaatttttccaattccatcaggggggttcccttcaggacaatttcccccacattaaacaggggatgcactttgtccacctttccggaaacgctgggagaaagcatcgtcaggtaggaggcctttacgatgccgggcgcggaaatggaaagagtgttcgtctgcagccggaggggtgtctccgttcctgcgggcgcgcagcccctgtttccggaagaggaaaaagagacggacggctccgttacaatagccgtgcctatcagaagcgccacaatccccaggccgatgcctatgaatcaggacgttccctttttttgaggggcctcgctcatcaacagttccgggggaaacgcgtcccgttatttgggatattccgtctccatgatgtgagaataggcctccgccgtttccacagccacggtttcaatattcttcatcaactgggcaaactgggcttccgtgaggtgcatgccttccagaacgaaggactggcggtaataaacatacccgctgttggggtccagctgaaaggcgccggccgtctggtccgcattcagttcgctgaggataatgctgacttccacacggcggttttcaggaaccttggcggcaaaaagcacgtcaatgaccagcgtctccggacgttcaatcatggtgtacaggaggctcaccggggtgaacgtatcacaggggacgaatgcgatgcctgtcttaatgttgtggtcatcagcggaagtaatccattccgtttcttcccctctctttctgagaacggtgtacacacggtccaaaaggctgagatgctggttttccatattgaaaattgtttaacaggggggttgcttgcaaaggcgcatgcaacgtacgcgcccgtttactgaattcaagcttactggcatccttctgattcgtcaagctctcctgacgtaaagaaattgaaaaaacacgtatgcggacggcataaaaaatacagacgccgtccgaaagggcggcgtctggaaaaaacgcgtgcgccgggagttccggcttctttccgaggttctttttacaggatatccccgggctggtagcccgccccgtccggaaacctgtccgtcacttccttcaccatggagcggaatgcttccacctgggcgtcagccatgcccgtagcggaggaattggaatcaaaaatgcgctgaaggtccgcccggtctattcccaggcgcccgtcttccgccaagcggtccagcaaattgttttccatgattttcccggcgcgcaggtcattggagacagccacggcatgttccttgatcacctcatgggcggtctcccggccaatgccgcgcttgacggcctccatcaggatggtggttgtcatcaggaaaggcaggtagcggcgcaattccgcagccaccacggcctcatacacgcccatctggttcaacacggtcaggaaggtttcaaacaggccgtccgcagcgtaaaaggaatcaggcatgactacgcggcgcaccacggagcaggaaacgtccccttcattccactgatccccggccagcccggaaatcatcatcaggaagcctttcaaaatgacgtggaagccgttgacgcgctcgcaggagcgggcgttcatcttgtgcggcatggcgctggagccagtctgccccttggcaaacccctccgtggccagttcatggccggccatcaggcgcagggtcttggcgaaggaggagcagccggaggtgagttccaccagcccggaaaccacggaaaagtccagagaacgcggatatacctgccccacattcatccacttggcagggatgcccaggtgggcgcacacgcggtcttccagttccagcacgcggacggcatcctgcccgaagagggaaagctggtcaagctgggttccaacggcgcccttcagtccacgcacgctgtaacggtccatgagggaaatccaggcccccaggccgtgcacgatgtcttccccgaacatggcgacacgcttgcccatggttgtggtctgcgcggctacattgtgcgtgcgtccggcaatggtcacgtgcttccattgttcagccagggcgctcatgcggttcaacacggccacggccttgtcccggatgatttgcatggacttccaaatctggagctgttccacattttccgtcaggtcccgggaggtcatgcccttgtggatatgctcgcatccggccagctcgcaaaattcttctatgcgcgccttcacatcgtggcgtgtcacgcgttcgcgtgcgtcaatggagggaaggttcacctgatctttcacccgttcataggcctcaatcaccccgtccggaatatccagccccagatccctctgggctttcatcacggcaatccagaattcgcgttccagaatgatgcggccctctgcggatcagatggatttcatggcggcggaggcgtacctttcagccaggacattgggaatcacgctcatatcaaaatgtgtatatgcgggggttatcaaaaacggtgagccgccatgatcatgacggaagggaaaaaagcaagcactttcccgcagcttcacggattagggacgccggggaattccgccggccggcaaagcctcccttccatgcccctgatccggcattgcgcctccccgccaataaaaatttcaagaacaggcaaaaatttttattcccgaataacggaatcgcaacacctccgcttaccgccatgttccttcattcccttggcggcggctccaggccgtaccgggcataaccggaaacgatttcctgaaggatggcggaaattttttccagggaacggacggggacgtattcatactttccatggaagttgtggcctccggcgcacaggttggggcacggcagccccatgaaggagaggcgggctccgtccgtgcctccgcgcacagggacgatttccggcctcactcccacggcttccatggccctgcgggcatgttccaccaggtgcatgtgcggaagtatcttttccttcatgttgtaataggaatccgtaatttccgcctttaccgtcccctccccgtatttacggttcagcagggccgcgcattcctgcatgaattccttcttgcgctcaaaggccgccctgtcatgatccctgatgaggtattccgcagccgcccgttccacatctccccggagtgaatccagatgataaaagccctcgtacccttccgtaaaagcgggattctggaacgcgggcagcattccctggaattccatgagaaccaggcaggcattcaacatcctgcccttggcgcttccaggatgaatggaagagccccgcaccgtcactactgcggaagccgcattgaaattttcgtattcaatttcccccagggcgcctccgtccacggtataggcgaaatccgcaccaaatcgcgccacgtcaaaggcatccgttccgcgtcctatttcctcatccggggtgaaggcgatccgtatctcgccgtgaggccgttcggggttcagcaggaaggaggctgccatatccatgatttccgccacaccggccttgtcgtccgctccaagcagggtagttccatccgtcacgaccaggtcctggcccaaataatccgccagttcgggaaaaacggcgggggaaagcaccattccctgttccggattgagcaggatgtctccgccgtcgtacgagcgcacgatgcggggcttcactccgctgccggagactcccggagccgtatccacatgggccacccagccgatgacgggaacattcccctccacgttggaagggatggaggcgtaaacaattccggaatcatcatccagttccgcctgcgctcccatgtccttcaattccccgaccaacagccgggccagctccgtctggccgggggtggacggcacggtggcggaatccgtgtccgactgagagcccacggagacatacttcaaaaaacggtctaaaacggagatgttcatgggaaaaatcaaggattggcaagagtttaccacccgcccccgcgaacacaagcacaagacacggtttattcttgcgattcaggacggtgtgccgtatgtaaacaaagcttctccccatgatgactcctctcccccttggcattacccttgctttgtccctgacctgcggctccatgccccttctggcccaggggtcgtatatgcccggccccatgcccgccaccgccgggacaaagcaggatccaacggacatgtacctggaggcgttgaggctggtgacccaagccgcaggactggtggaaaaacgggattatataggagccatccgcctgacgcagcaggcggaagacaagttcggacgcctggctaagtcttatccccaatggcgccccaacctgctgcaaacgcgccgccagctcaacagggaaaatctggaccagtggcagaagctggcccagcagcaggccgccgcctcttcttcatccggcctggagctggaacgcccggcctccgtgccgaagcgccccaggccaaaacccaacatagccctccctcccggctacaagggcgtggaattccctacccgtcccggagaatccctgatcaataccatcccgtccccttccgtttctcccggggcggctccggaagtggtggagagcaattacgaacgcatccgcagactgctggataaaaccaccatggagaacaatgctctgatccaggctctcaagcgcacccgccgggagcaggaggagattctggcaaaactggccgtggcatccgccggagaatccgtttaccgggatgaattgctcaaggtcaaaaagcagatggaggatgaaagaaagaccagcaacaagcttatccagactctcaccaggagagtggaggaactggaacaaaatgtcacctccctcagccaggacaaagcccgttatctggcgcagatcgccgatcttcagctgcagctcagggagtaccaggacaagctggacaaagtgacggatgagaaaaacgcccttcagaaagaccgggaccaattggcggccctggtggagctcaacagcccggacaaaacaaaaaacctgttggaccgcaacctgacgctggcggcccagctcaaggatgcccaggacaaaatcgccgctctggaaacggccaaatccgattccgaagaacagcggaaagccaacttgaaagcgttggaagaggcgcgtgaggaatccgcagacctgaaacagaaactgattgccatccgggatgaaaacattggctaccgcaaacgcatcacagagttgaataccaagctcatcaatgcggatgtggaactgtccaagctggaggccaatccggaaaaaagcccgcttcttctggaagaaaaccagctgctacgctccaccatcgccaagcagctccgcatactttccgtgcaggaccagagccgctccctgctcatcagcacttataagcggctgcatcaggaaaatccggacacggcggaaatagcctccctgatggacaatgaagaagccatcaagctcactcctgcggaaaaacaaattgtcaacgccattgccagggataacaatatcaatgttcccctgacggatcagcagaaggaaaaaatcaacaagctggcgcaggccctctctgcggaacgcggcaaggccgcccagcttgcccgggatttggaactggcgcgcagccagatgaagaccaaagcggacaaatccgccagaaacgacaagaaacaggcggaagccctggcgcgggcccagaaggccctggaacagaaaaacattcaggtggaggaactcacccggcagatggaagaactgaaaagccgttccgccgaacaggcccgcctggccgccatctccgccggaaccattactccggaccaggaaaaagcgctgaaccggagcatggaagccacggtacgccggaagctggaggcggaagccctggggcaaggcgccgcagaagccttcgccaaaaaacgctatgccgccgcggaacaactgtaccggactttgctggacttccagccggcccacgttccggccctggtcaatctgggaaccattctgcttcagcgcaacaaggcggaggaagccattaaatttctgaaaaaagccacggaactggacgcctcctcctcccccgcatggttcatgatgggggtggcccaataccgcgtcggggaagaccaccacgccatcgcctccctgacggaaacggtcaggctggatccggccaacgctcccgccctgctttacctgggcaacctggaaaccagcgccgggaactatgaaaaagcggtgtcccactttgaaaacgccctgaaaatccagccggaatcaccggacgcgcacttcaacctggcctggacctattcccggctgggccgcacggcgcaggcacgcaaaagctatgatgcagccatccgctgcggaggcttgccggattccgacctggagcttgccattaccggaaccaccacccttccccgcaaaaaacaggccgcggaccagaatcccgcatccgccgcaaaagaggacggcccccagctggccgcggcaataagcgatccgtctgccattccccacgatgccaatgaagtgcctgctcatgtggcggaggatccaaatgcgcaggaaaagccgtccgccggtcccaaacaggtcgtcgtcagccaccgtccggaaaccgaacccgtctctctggcagcccaaatgagggaaactgcccctgcggcggcatccgcacaacctccggcagaagccgcaactgccgcaacggaaacgcccaagccggaaaagcaggaacctccgcgcaggaaaagccgtttccgaatcggttcctgatggaattcttcccttttccagtaaataaagccatgtatcacgtttccattttaggactgggcctcattggctcacggattgcacgccatatggccggaatgggcgacaaggtcaccgtctggaacagaactccgcgggaagattttccggaagcggttcctaccccggcggatgcggcacgcgcttccaaagttatccagctctacctgaaagacaggaatgcctgtctggaagtgtttgaacaaatgagaggggctctgacaccggagcatatcattctgaaccattcaaccattgacctagcgaccgtcggcaaactctccctgatgagttccgccatcggctgcacgtatgtggattgcccgttcaccggctcccgtttgcccgcggaaaaaggggaactggtttactacgttggcacgaattccaccacactggaccgcatacgccccgtgctggagcacagttcccgggacatcctgcacctgggcggcatcggagccggcaccgtcgtcaaactggtcaccaacatggtctccgccaccatggtgcagagtttgggcgaagccctggccatctcccaggcgtacggcatttccccggaaatgctgggccaggccatttcccggaacgtcatcgcctcccctctggctgcatttaagctgcccctgatggcaaagcgtgacttttccacccatttctccctggacaacatgaggaaagacagtatttacgctcaggaacttgccgcagaaaaaggaatccacccgcctgttgccgccctggtttcctccatcatggggaagctgtgccgggaaggccgcgcggaagaggatttcagctgtctggcggaacaattcgactaactttttccgttgatgaaattcaggggaacatgcgtctttctgttgacggctcttcttctgctccctgccggccggggacaggaacgaaaggagcctggcaatgattcttccgcggaagtgcggcagacggaagaagaatcagcatccgtccagaatgctgattttattgatgacgcctcggaccgtccagtattgcagggcagttccaatgtaaaccccgtcgttcccccttcaccttcggcaaggaccgccgccggagcggaggaacagcccgccaaaaggcagccgttcaccagcgtttccacctccaagcaattccacgtcaccgggatggactccctgctggccggggccatcgccacccgggcggatgccatacgcaccgcgctgctaaaagtcctcaagcagcctgacgaatggaaaaacggcatcaacatccgcctggtaggagagccgggaagccccgttccggccaaccccgtccgcatgcaaaccgtcattgtaggcaataccctctcctatagcattttcattcatctgggccacggcatcaaccaggacagcctgcgccgcgccatcgtctccaccctgctttatgaaatgatgctgcgcacagtggacccggaaggcctgccggacaacgtcacgctgcccccctggctgattgccgggttggaacaggctgttctgtggcacaataatgaagctgaccgtgccatgtattccaccctgttccagcagtccggaattatgactccggaagaaatcctgaattgccgggaaccggaaaaggaactggatgcgacctcttacgcggcctatcaaacttcctgtggagccctggtgctttgcctgctgaaccaggaaaacggtccggaagggatgaaacagcttctggatcaggctattctgggcaatgacgatcccagaaacctcatcaaacgccattttccgcagctcagcctgacccccacttccctccataaatggtggacgcttcagctttcccgcatggcgacgcctcccctgacggaaactctcacgattacggaaacggaacgtcatctccaggaagcccttaccctggtcaagtatgatccggatacccgcaccaccgtcacatttcccctggatgacctggaacaggcccgttccctgccggatctgaacaggcagctttccaacgtggctggcagcctgctcaacctcagcaggcgttcctttccttcataccggcccgtcattgtagaatatgccaagctggtggccctgatgcaaacagggaaagtcaacagccgggaagccgtccccaaaatcagccagcttcgggaaataagaaacctttccatgaaaaccgcccgccgcgtccgggactatatggactggtatgaaatcaacacgcggtccggaaccggcaagacattcgcttcctacgcggcagccgtgaaaatcctccgggaacaggaacagccggccaatacccctgtttcccgctacttggacgacattgaaaaactgtacaccctcccggccagggctcccgtgccctccctgcatgggaaggattaaggaattaaggaaaggcgttctgcggcggagccatcctgccgtccctatcaagagcgccgcacttctaaaaaacggcttcccgtgccgtgcaatgttctatcttcacggcatcacaaaatgccgatgagttctccccggaagccggatggtgcggaaatctggtgctatgaagagaattgcttgccggaacatgccaaatcaccggcagaaaccatgcatcacgtcatgaaccaatagactgtccgtcagcgttttgaatcattctctgcatcagcgctcatccccgccgcagaaacgcgcatttttttatgtggtctttttttattcagaaagattcagggattgtctttcccaagatgatttgcaatcatcaccccgaattattttcatatcactacataatatggacacgtcattgaaactccacggcctggtggccgccgtacacactccgttcaaggcggacggttccctgaacccttccagcgttgacgcccaggccaagctgcttgcctcccagggcatcaagcttgctttcattaccggcagcaccggggaatcctcctccatgcagcttgaagaacgcaaggaaatctattccgcctggaaggaagcctccgccaagcatggcgtggaagttatcgcccataccggttccaacagcgtctgggacgcccgggaactggcctcttttgcccaggaatgcggattcgtggccaccagttccctggccccgtcctactacaagcccggcactgttcagcgcctggtggaatgctgcgccttcgccgcctccggcgctcccgacctgccctattattactacgatatccccgtgctgacgggcgtacgcttcaatccggtggatttcatcaggctggccaaggaacagattccgaatttcgcaggcatcaaattcaccaatccggatctggccctgtaccagaccacgctgaattacgacgagaccgtggatattccctggggtgtggacgaatggtttacgggcgccctttccgtgggggccaagggcgctgtggggagctccttcaactttgctccggccctgtaccagaaactcatgaaagcctttgcggaaggcgatgtggaaacggcgcgcgactgccagtggaaatccgttcagatgatcaatatcctggcctccaagggctatatgggctgcgccaaggctctgatgggctggctgggcgtcgatcttggccccgcccggcttccgcagggcaacccgaccgcagatcagctgaaggaactccgttccgaactggaaggcatcggcttcttccagtgggctttaaactgaaccccggaacctgactgacatggctgcaactcttgatatgccctctttgggcaagttctaccgccgccagcttctggaagacgttctgccgttctggttcccccgtgcctacgacgaaaaaaacggtggtctttaccactgctttgacgcagacggcacgctggtggactccgacaaatccgtctgggcccagggccgcatggcatggatgctgctgacgatgtacaacagcatcgaaaagaatacggactggctcaaatgggcggaaagcgccttgggattcctgaaaaccaagtgcgttgacccggcggacggccgcatgttctttcatgtggctgccgacggcacccccatccgcaaacgccgctacgcctacagcgaatctttcgccgccatcgcctttgcagcgcacgccagggcgaccggcagccgggattccgcccgtgaagcccgccactggttcgacatcttcacggacaactgcttcactcccggcaaaatggttcccaaattcaccggggaacgccctacgaccggtctgggcacccgcatgattaccctgaacacagctcaggaaatgcgcaagtacctgggagatgacgacggcttctataccggctggacagaccgctgcatcaacgacctccgcaccctgttcatgaaacctgacatccaggcagtcatggaagtggtgggaacggacggctccatcatcgaccacttcgacgaacgcaccctgaaccccggccacactacggagggtgggtggttcgtgctggaagaagcccgccatcgcggcaatgaccccgaactcatcaaggtgggctgcgacatgatcgactgggcattcgcccgcggctgggacaaggaaaacggcggcatgctgtactacacggacgtgtacaacaagcccgttcaggaatactggcacaacatgaagttctggtggccgcatgatgaagcgctcatcgccatgacgctcgcctacaagctcacaggggaagaacgctatgccatccgtcacgacatggtgcgcaactgggctttctcccacttccaggacgttcagcatggcgactggttcggctatctgaacaaggacggttccagggccaacaccctcaaggggagcctctggaaatccttcttccaccatccccgcgccatgtggtgctgcgcccactactgcggcgccatttaagaaggcgtcaggctgtttcccgtcaggcggtcattccatatccatggaacggccgcttttttatgccctcaataccaaaattcagagggttccggataaaacaatctatccgtttttccaccctcaacacaggataatatcctccgtccgcaccaccacatcgccgggatccagcatggcattaatcagggaacagaagcggaatttgcctatatcttccgcttttacggaacattcctgaatgtctccgcgggacagcaggaaggcgcgcttggttcccgggagcaggaaagtttccggagtaacccaggaagacccgtccccgaacaccacgttgctgtaccgcgtatccgtcaccatcccgttccggagaatcagcgcttcttcgtcacagcccaacgccgcccctgccgccagaagccctgtccgatcctcccacttgcatgagtaatccagcccgggcatttccatacacgtcagcgtcttcacctgccggggacggtagggctcaaaggaggtgcggcgcacccttccccgcgtatcatacgtgatatggcatttgtaaacaccacggccctccgggccgggacagtccgaaagaacggaagccagatcggggacggaagcgtcgtccgaaccatgaacgccgatggaggcctccaccctccgctggtgccagggaagcagacagggagcgccattctcccatttaacggtttcaaaaatcaaacggcacataaactttggcaacagcttcccggtattcctcttccattcggctcatcacggtaattcctccaccgctcttgtataccattccccgttcatcctcctccatgaagcggatggagacggcggaatccaaatcccgcccgttgaaaaagccgaaaattccggtataaaaccccctctccatatcctccgcttccgcgatggcccggcaggtagcctccttgggcgctccggtcacgctcccggcaggaagcagcttcagaaggatttcccccaggcgggaacgccagttttccggcaacagcccggaaatctcggaactgcattgaagaatagtccctttggacgtttctacagggctgatatagcggtaacgcttcaccctcacgccggttgccaccatggaaagatcattgcgcatcagatccacaatggtggcggattccctattctccttttcatccgtttccagccagcggcgcgcttcctgcgtagcggacggaaccgttcccttcatgggaaacgtggaaatggagcggccgcgcaccgtgacaaacggttccggagaaaagcagacgcagccgcggccgtgcactccggaaatccgcgcgtccggccccagcagcatccggtaaggcgcgcgggcaaaccagaacagatggcgcagcgtcaggttggtttccacgggggtggacacgcataaattcagcaggtaggaatcccccctcatcagatggttccggacggaagcgaaggatgccgcataccgggacacgggatggggggatggaatgaaccgcagccgttccggaagcggagggccgccggcctgacttcccatcgtgcccagcggcagggaaaaagcagccatgcgctcccccttcgtttccgaaggttcaaacagcaggttatggcccatatcatgggagatgacaaaaaagaacggacattccgcacggcccagggcattcatgcggctgatggtctgttcccgtgtgtacattgtcgggaattactctatcatgtgcgcgccatgagtcaaccgaacgtctggatcatcgaccaccgggattccttcacctggaatcttgcggaactcgtcagaatgacgggaatggccgttccgcgcgtggtttccaatgaatccccggaactggaacaggcggttcaggcgggggaaaagattatcctgtctcccggtccgggaacggtggaggatgcctgccaccgggccaccttccgtcttctggaccgcctgccccgctttaccccggtgctgggcgtatgcctggggcatcagatcctgggcgtgcgcttcggagcccgtctggaacacctttcccagccccttcacggagcgcgggaagtcatatgcaggacggagcagtgtcccctcctggaaggattgccggagcaatttcctgccgcgctttaccattcctggcgccttgccgcttttccctggccggcggagctgattgtcacggcgagggattccgggaaaaacgtgcaggccatccgccacaggcacctccccctttacggcattcagttccatccggaatccatcctgacgccggacggagaagcgctgctccggaacttcctgtcccttccggcaggcagcagggaaaaacggcgcatcaaatgattcaattccagccgcctggcatcagggatgaacgggacaagaccggaaagtgtctcactcccgtgcggttccggttcccatgcccggccgcttcagagataacgtttttcacctttatgaatgcacaggacgaactcaagatcagggacatggaaatcctgttccagcccttccactcacgcaagctcagcactcccacccgcatcgtccttccggccatgacccggggattttctcccaacggggttcccacggaccaggtagccgcttattacaaaaggcgggccagacatgaagtagggctcatcatcacggagggcactttcattgacgagcccagcgcctcgccttcctccaactatcccaatttcttcgggggcgcttccctgcggggatggaaaaaggtgctggaagccgtccacaccacggattgcaaaatagccccgcaactctggcatgtgggtatggcccggcccttcaagggagaaaacctgcccaatccggagttgccgcccatcggcccttccggaattgacgtaaacacgctggaacagacggcggaaccgatgagcatcgctaaaattgaggaggttatcaatgcttttgcgagggcggctgcggacgccaagcggctgggttttgacggtgtggaactgcatggagcgcacggctacctgattgaccagtttttctggaaggagaccaacaggcgcacggacgaatacggaggcgacctggtaggccggacccgttttgccagccgcatcatccatgccgtccgcaaggcagtgggcagccagttccccatcatcttccgcttctcccaatggaaaacaggccattataacgccaagctggcgtatacccccatggaactggaagcttttctggctccgctgacggatgcgggcgtggatatctttgactgttccacgcgccggttttgggaaccggagtttgaaggtacccgcctcaatctggccggctggaccaggaagcttaccggaaagcccacgatctccgtcggctccgtggggcttaagggagattttacgaatgcctttgacggggggccggaagcggaggccgccagtgtggaacctctggcggaacggctgaaagcaggggaatttgacctgattgccgtaggccgcgccctgctggcggatgcggaatgggcggaaaaaatacgccatgcgcgggaaaaagatatccacctgtttacgaaggaagacctgaaaacgctgaaataacggatttgcctgaccgcaaggatgatgcgggaactcactccgcaaagccgggaggggcaaaaacgccaggccgctccaaaacggaggagccgtcttctttccccgtttcctcagcaatcatcattcccgcagaggatattcttttatttcttcctgacgcggacagtcaggtacaacagccgcaaaagagccaatgccggaatctgaagcgtcagcaaataccacggagcgggcccgaaatattccagtacggtccctgccggagcataccgggtaaaaccgtaattcgtatccagccagatattcaccggaataatacaaaccaggtaggcgtcgcacaaacccagcgcccgcatgtcatcccacggccgcgcacgccattgcaggacggcgggaaggtaaagagcggaaatcaataaaagcccatgcccgatgaaaaaggcgaaaaaggcggcggaggggaaaccgtcgtgaagcatgggggtaatcaatccctggacgcttgccgtcagcacgccgaaatacgccacggcgcatgcccagggtgtacggaaccacagggcgataaaacagaccagagccatcagactgcaaaaatgcagcggaagcctgtcctgccagggctcccaatgttctctgacgatgcggccgaatgtttccatcaggaaagtcagcaggaaaaagcttcccagaacctttcccacaagcaaacggctctctatccggagccgccggcatccccacaggagcccccctgctgccagagccacgatgcccagggcagcccagtgcggcaggctccaacggacaaacaggggcgcaatttctccggtcataaaaaaatccatcaacgggaaggaggaggttccgggcacgcatgaagtttggcgctgacggcctccaccttaagacgcagaacacatacggaacggaccatgccgggggtaaaatccgcatccctgcccgtctggtgcagcatgatgcggcgcaaggcatgcatcttttcctcatcctcccggagaaattcgacgacgccacgccccatgacgcagccgtaggcgtaactgtaccggcacgggacatccccctccagcaacgcatgatccccatccatttcaaaagaaacctccggacggttttgcaggatatccagcttcctcccttccctggcgcagtggaaaaacaggctcagggaaccatttttttcttcatatccgaagttgaggggaactacatacacttccctgccgtcccacagtcccaggcggcacaccttgaaccgggcgaccatttccatcaaatccccgtgccgggtcacttccctgtcttttcttctcataagccggcgccctccatccattcattcatgcaaagggcggcacgtccggccagcagggagccattccgcacggaagccgcccgaagtccgcaaatatccgtccccgcctgcatcaattcacaggcatggccggtcagccactcctccatccgggaaacatccgcctccacatggaactggagagccagggcatgcttccctacgcaaaaagcctgatggggggtcacttccgtggatgccagcaggcgcgctccggaagggacatcaaacgtatccccatgccaatgcaggacgggcaccccctccagataacggagaggggacaaacgcccgtcccccgtcagggatacggttccccaccctatttccctggcctttccgggataaacgcggctgccgagggcatgggccatcatttgagctccgaggcatacgcccagcagaggctgccgactttccagacgcatgcggaccaaatccagttccgtcttcaaatagggatacgattccgtatcccccacccctacgggaccgcccagcaccacgcacaggtcagcctccaaccattcccggacggaaggacagggagcgcccgcccggatgtaccgtattcggaagcccctgtccctgaaaaggggttccagcgtaccgagatcttcaaaagccacatggcgcagggccaggcaagtgcgggatgcagaacggctactcatggcgacggaggatgaacctcaacaaggaatatagaaaaaaatcctccgggaaaagctttttgcccttttccctccgcatttccggaaccaggatgtccatcatgaaacggaaatatccgccacatccgcaaaaaagccctccgccgcacggcataaatccacaggattcaattcaatctggcaccccagacgtccgccgctcaccaccatctccggcagggcttccgcgctggcatcaatcaccgtagggtatttccttttcatccccaaagccgtgcagccgccgcgcacgtaccccgtcacggcggtaatatccttcaccggaagcatggaaagagccttttctcccacggtgcgggcagcctttttcaaggaaagctccgcgcctatgggtatcacgaacacgtaatactgccgcggagctccctccgttaccagcgtcttgtacattttctcctcctccaggttcagtgcttccgccgtatgccgcgcatccacaaactcgcggcattcataggaataatgcctgtacgggatatgcagcgcatccagcaggcgcatggcatttgtctttgcctccttctttttggacataaacttgaaaagggaacgtcccggtaacatagaaaaaaagccttcctttgacaaggccgagccccccgacggcccctatgaaaaagtggaacggaaacgggaatttctctgaaagagcggtaaggacagcaacgccgttcccccagtgcagcccgttcacagcggagaatttcagaaacggaggacggcgaaaaagaaaaaggaaaaaacgcctcatttcctcagaacccttgacttgccgctggcagaaaagataacatccggtatcatggaagattatcgtgtccggagaagccttggagaacatgtcctgcgctgctccgtcctgattgctgcgctcttcatcatgtctctgggcatcgctctgtccaccaaggcagacctgggagtctcccccatctcctgcacgccctatgtgctcagcctggcattccctctaaccatggggaccgtcaccatcctcatgcacctgagctttgtggccgtgcaggcggccctgctgaaaaggcaattccgtccggcgcatctgctccagattcccatagcttttatcttcggctttctgacggatttttccatgtggatcatagcgcctctggaaccggacggatacctgtgatccgttattctctgcctgttcagctgcgtggtaatcggattcggcgtctttcttcaggttaaggcggattccgttcttctggcaggggaaggcatgagcctggccttcgtcaaactcttcaaatgggaattcggagccgtaaaaaccgggatggactgcacgctcgtctgcatcggcctggcctgttccctcatcttcctgtccggactgacaggcatacgggaaggaaccgtggtggccgccgtcctggtgggaatgatcgtccgttttttcaacaggcacgtcttctggccggacaggctcctggaacggctggcgcgccccggagcagcaagcgagcttcctccgctggcacaaacggccgcttatgctccggacgcccctctggtcatttccattgaccgggaatacggttccggcggccatgccatcgggaaaatgctggcggaaaagctgggcatccgattctacgactcggaactggtgtacctcacagcctcccggagcggcctcactccggactacatccgtaagcacgaacaacagctttccagccgctttctgcacgaactttacgcccagaactacgcctacacggcggaggaaatgccccctgaagacgccaccttcctggcacagagcaaagtcatccgggacattacggccagtcaggcatgcgtcatcgtgggccgctgcgccaacttcatcctgaaagggaggcccaacctgttcagtgttttccttcatgcggaccgggccacgcgcatgcagcgcgttattgaaaactatggggtagaacctggcggggcagcccgggccatggacatcatggactcccgccgccgcacccactgcctgcactacaccgggcaggaactgggcaatgcacgcctctacgacttgtgcgtcaacacgtccgattacggactgaaacgcacggtggaactgattctggaagccatcaataccagaaccgaacaatcttccgctgtagaaacggttcccgtccgctccgcatcttttcccgaaccggaagaggacagcattcccggagaaatatccctggcctgacaggggcaaatgtctccaacagccaatatttatgtaacaactgccctcccggcaccttgttcaccggtaacagaatccgttgtctgaaaaaactgcctggccgataaataggaaactctctccccctttccataatccccgcaaagggaaagattccgtatctccttcagatgaaaaaccggctggaaaacgaatggccccttccacacaaaaggctgcccctcccaactccccgtttttttgccggctgcataattcaaaacaacaaaaggcagcctttctgagtccaaaaaacatgagactctggtcactccacccctcttacctggatgctgtcggcctggttgccctgtggagggaaggcctcctggcacgcaaagttctgcaggggcagacaaaaggatatatccatcatcctcagctcttccgattccgggagacggaaaaccccattcatgtcctggatttctacctgaaaaccgtccatgacgaatccatccgcagaggctacaattttgatttaagcaaaatttctccctgcgaaagccgtccccattcccttctcctgccggataaacagctcgaatacgaattccttcatcttctggataagctcaaggaaaggtccccccggcaatattccctgttgcggcaaaccgcagtcccccttccccatccgctttttcaaataacgccaggagatatttgctcctgggagaaaaagcctgtttcgtcattaacatgacttcatttccttctccgggaaaggctgccttccaataaatatttttggaatgcccccttattcccgctggaaactattgatccggtttggcatcttttcatagtgacggggataaaaccacagacatacgccatttccatctcatcacccgggcagtcactgcagcgagcagaattattgcaagaccctttccaaccttttacttcttcaggcccatacggtgaaaaaacatgcctggcaaaatggaaaaggccttaaagcgtttgtgctttaaggcctttatttggtggagcatagcgggttcgaaccgctgacctcttcaatgccattgaagcgctctaccaactgagctaatacccctttgactttcgtcttggtgcgtcctgttgaggacggggaaaaattatcatttccaaagcgggcatgcaagctttttctacaaaaaaattgccccgggatgttttttccggaaaatactgaatccggaaaggactgcaaatcccatgcagacgaaaacagggacagtctgaacaaatgtgtttgaatgagactcattcctgttttacctttccataaatgatgaaacgccctctttttactcatcgcatgatattcgcctgcgctctggcaattttgtccctgtcctgttccgttcacgcccaggagactccagctgcggaaggaccgccggcccagacggaggacagcggcatttccactccccgcagagtcgccggactgggcgttctggcattcctgatcggctggatgatttggaggagcagttccagccgccagaaggacggaggccatgaccaggaggcaccccgggaatgacgccgtttttgaaaggttgccctggttcctgccgtagtcgttgcaggaaaggagtctccagccatgaacattattctacccatcctgagctttctgtgcggtgtcatgctgacggaaacagcttccggctcttctgaggagggaaagccttctcccggcgtagtgcaggaattgtggttcggcattccgggggcatccgtaaaggacctgacccacaggaagatttttgaaacggcagccccggatgtccgcacgatcagccatctggatgtggaaaacctgggagacaggtacggagcccgttactccgccctgctgaaagtcccggcaagcgggaagtaccgcctttacctgtcttccgacgattccgcagagttatggctgggcaaggatgcctcccagaaggacatggcctgcatcgccaccgtcaaaggatattccgacatccataattggggcaaccagcccaaccaggcttccgaacctgtccagctggaagctgaccggttttattttcttcaggtgattcacaaggaggatggaggcccggaccacatgtccgtagcctggtccgggccgggcatccccgcccctgtcatcatccctgccacggcgctgttcataccgcccggaatcttgccggaagaaaaaaaacaatccccagccaaagcggactgaaaggttttttgattaccttcccgccgaggagacatcatcaatttgccgacgagaaaataaatattttccataaaactccatcaatcaatcatttccaatacaaaacaaaccggacctccctccatcggggaagcccggttttttctcgtcgtatatcatgtagttaattgaagcggcctgacacagaaaaatgccaaaacaccttctgaatccaaatctagcggatttctaatccgcggtcaagttcccagtttgaaaggaaaggctttgagaaaaagtcccgatgcttcacggggctatccatcttggagcagaaacctctctctttttcaagtgaagtataagattccaagagaaggaaaaaggaatttttgctattcatgtcgtttcaaaatccgggaatcatttgctttcaaagatttatttctctttgaattcataatgaccagcattgcttctcagaggagagaagcttctctccctgaaaattttttatcattatgaaggttgcggattagaaatccgctcttcatttctggaaaagaaaatgtttctttatcgggtaatattcagaatgcctatcagtaaataatgttactgaaaaagcacgctttcatcccttccctatgttcggcatgaatgaattttccgctattgaaacataaatagtcattccggttatacacatgttattatcgttttattcacaattcttcttcctttttctccagtccccgcattctttttcctgggaacagcgtgaaacaggaaagggacatacggaaacggaataaaaaaatggaaatttcccatccttccagaaaatccgggatgaaacataaaattttcacaggcgtttttactttccgcaaatcatccccataccttttccattcccttgaaaacaggttccttccatttccccggagcaatacgggaaaaacgtgacgacaattgtccttgttccaatgacggacggacggtagattttccgcgccatatgagcagagcatccagaacagaacgccttgattacctgaaagaccagttacgtaagagggttgtcatcctggatggcgccatgggaaccaatatccaaaaattcaggctgggagaggaagattaccgcggagaacgttttgcggatgcggcacgctatcccaacgatttaaagaataataacgaccttctggttctgaccaggccggatatcattcttgatattcaccgccgctttctggacacgggacggacggatattctggaaacctgcacattcggagctaccagcatcggccagcatgattatttctggcaccgtccggaggaaggcagccacaaggaccagcagtatttccaggaggtggtggacgcccccgaattgaaagcccttgtccgggaattgaatttggcggcagccgcactggcccggcaggcatgcgacgaagcggaagctgcagacggcaagccccgtcttgtggccgggtccatcggccccatgcccgtcacctgttccctgtcccccgacgtgaatgatcccggcttccgcgccgtgaatttccgccagctcaggcaggcgtaccgggatcaggtgctggccctgctggaagggggggtggacatgctgctggtggagacgattttcgacacgctgaacgccaaggcagccctgttcgccattgaagaaatttttgaggaacaaccggaaagctctgttccggtcatgatatccgtaacgctgacggacaaagccggacgtacgctgtccggccagacgattgaagcattctggaactccatccgccacgttcgccccttctccgtaggcatcaattgcgccctggggccggacctgatgcgcccgtttgcggaagaactgtctggactggcggattgccacatgtccatttatgcgaatgccgggcttcccaacccgctcagccctaccggctacgaccttctgccggcggatatggcccggttcatgaaggaatacgcggaccacggcctgctgaacatcgtgggcggctgctgcggaaccactccggagcacatcggcgccattgcggctgccgtggaaggaatgcctccgcgcgttccggctccccaaacgcccgcgcttcgcctgtccggatatgaagcgtacaaccatacgcgggaaaaaaacaccctctttgtcggggaacgctgcaatgtggcgggttcccccaaattcgcccgcctaattcgtgaaggaaattacgaggaagcggtatccattgcccggcagcaggtggaaaatggcgcactggtattggatttctgttttgacgacggcctgatcgacgggccgcaggccatgatccgcttcctgaaccttgtttccgcagagccggatatcgcccgcgttcctttcatggtggattcctccaagtgggaggtgctggaagcggggctccaatgcatgcagggcaagggaatcgtgaattccatttctctgaaggagggggaagaagaattcctgaagaaagcggcgctgattaaaaagtacggcgcggcggtcgtggtcatggcgtttgacgaacaggggcaggccgccaattacgaggaccgcgtccgcatctccagacgggcctatgacttgctggtaaaccgggtgcagtttcctccggaagacatcgtttttgacccgaacgtcctgaccgtaggcactggcattgcggaacacgccgattacgctcttgatttcttcaaggccgcaggctggatctcccggaacctgccgcatgcccacatttccggcggcatttccaatgtctcctttgctttccgcggcaacaacccggtacgggaagccatgcattccgctttcctgtaccacgctacgcagcaggggctggacatgtgcatcgtgaatgccgggatgctggaggtgtacgacaatattcccaaggacaggctggagctgattgaagacgttctgctgaacaggaggacggacgccacggaacgcctgacggattacgcggaaaaactggctgcggaaaaaaccggagacggaaaggagaaaaaaaccgtacaggcctggagggagcaggacgttgccaaacgtctggaatattctcttatcaagggcattaccgaatttgttgacgcggatacggaggaggcttttcaggagctgtggatcccgctgaacgtgattgaaggccctctgatggccggcatgaaagttgtcgggcaactgttcggggacggcaaaatgttcctgccgcaggtggtgaaaagcgcccgcgtcatgaaacaggctgtagcctggctcaccccctatatagaagcggacagcaaaggagccgccaaggcgggaaaagccgtgatcgccaccgtgaagggggacgtgcatgacatcggcaaaaatatcgtcggcgtggtgttgggctgcaatggttttgaaatgattgacctgggcgtcatggtccattgcgataccattctggaccgggcggaagcggaacaggcggacctggtgatgctttccgggctgatcaccccttccctggaagagatgtcccatgtagctgcggagatggaacgccgggggatgaccgttcccctgatggtggggggagctacgacgtcagccctgcatacggccctgaaaatagccccccattatcaaggagccgtggtgcatacggaggatgcctcccaggtggttcccgcagccgcctccctggtgggagaaaaaaaggattcctacattgccgccgtgaaggcccggcaggaggaattgcgcaacaatcatgaaaacaaacccgcccgggacctcctgcccctggagaaagccagggaattgcgctggaagggagcggaaggcggctatctcccccccgttcccgcccgtcttggcccggtttccatcggcagcctgcacagctccgtaagctgcggctgctgcagtgacgatccacgttattacgtaactgttcaggagcttatcgagcacatggactggacgccttttttccacgcctgggagctgcacggcacatgggaccgcgcccgccgggagttccgcaccaaagacccgtccaaggctgaggcggccgcggcgctgtaccaggacgccctccgcctgctggaacaggccgtgaaggaaaaccgctaccaggcgcgcggcgtcataggcattttcccggccaattcaacagccagccatgacgacatcaccgtctgggctgatgaatccagaaccactcccctggctacgctgctgacgcagcgccagcaactggacaaacaggggaaaccccggctggcgctggcggatttcattgctcccgaaggcgtcagggattacgtgggggccatggcggtcagcatccacggctcccgccgctgggcaaaggaatgggaagccagaaacgactcctaccgcgccctgctggtcagctctctggcggaccgcctggtggaagctttcgcggctatcgcccatgacaagctgcgccttttgtggaatattccggaagggtccggcgtgcgacccgcctgcgggtaccccagccagccggaccaccaggaaaaggaaactgtcttcaccctgcttcacgcccgggaggaagcgggcatgagcctgacggaaacatggatgatgcagcccgtttcttccgtctgcgccctcgtcttctcccatccggaaagcacttatttctccgtgggcgtcaccggggaagaccagcaggaggattacgcctccagaaagcgggcctcccggccctgacctcccctttcccttttatgcagcacaccgaccagatacaggccctttcggaattcctgctggaatacgccaccaccctcatgggcgcgggggtgcacaccaatcgcgccgtgcgcaacatttcccgcattgccgccgcgtacggatacagcgcggacatgaccattttccagcgcaatatcaccatgagcctgatttgcaaggatgacgagacgctgcgccgcacctccgtccggaaactgaaacccctggcgttcaacctgaacctgatccagcagctcagtgaattgagctggctcccggtggacaacaacgtcagcatttcggaaatggaacaggcattccgctccatggtgcgcaccaaaagattttcccgctggacggacctgctcctggtcagcgtgggcaacgccgccttctgccgcctgtttaacggagacctgtgggccatgctgaccgtgttcgccgccaccatgctgggctttctggccaagcagcagcttacccggttgaaatacaatccgctgggggtcatcatcctttccgccttcaccgcctccatggcggccgcatgcgccgtccttttccagataggctccacgccgcagatcgccctggcagccagcgtcctgttcctggtgcccggcgtccagatgatcaactccatcatggatctgatgcacggccacatcctgatgggcatctcccgcggcatccattccatcatgatgattgcctgcatcgccatcggcctctccgcaaccatgctcatcgtaggggtaaacagcttatgaatccggatcttatttcctccatccttctggacgggctgatggccgccatcgccgccacaggatttgccgtcatctccaatccgcccaggcgcgccattgccgtttccgccgttctggcggccgtcggccacgctttccgcttttacatgctgcactcctggaccattgacatttccagcgccaccttcattgccgccttcaccataggcatgctgggcgtcatgacggccaagctggtgaagtgcccggcggaaatattcgctttcccttccctgcttcccatgattcccggcgtgtacgcctataagaccatcctggccctgatgcagttcatgcaggagaaccaggacgcggccgtcatgaaccgtctgattgtggacatctgcaaaaacggcatcaccgccttcttcatcatcttttccctggtcatcggagtagccatacccatgctgatgttcaaacggttgagctatacacgcatcatcaagccggggcattgaccttcaaacaagggagacagggcatttttctcttgccagactgcgccccgtgtggtttactacgccccgcaacggcagaaacgcctgagcagacagccccatagtgtaattggtaacacacctgattttggttcagtatttctaggttcgagtcctggtggggctgccaatccaaccctccttcaaggagggttttttgttgccttttttcaggattcatcctcttccggagcaagcttgaacgccattcccccatcatccgcacagattcttgaaaatccagcaatcgtcctgccgcgcatggaacatgcgggggtggagggaaatgccggaaagaagggtattccatgagcatcgcacacacggcattccgggacggtaaaagctcttgcgttacagggatttttttgcataatcccccggcaggaatgacggaaaaacctatacaacttgggcttgccggtctgggaacggtcggttccggcgtttatgaaacgctgtgccgcaatcacgcccttctggaagcccggagcaagattcctttcaggctcaagcgcatcgccgtgcgcaacctggaaaagccccgggaaaccgtcgttccccgggaactgctgacggacgattggcaggatttggtaaacgacccggagatagacatcattattgagctgattggcggaacgcgccaggcttacgacctggtgacgctggccctccgtgccggcaagcccgtcgttacggggaacaaggctcttctggccgagtacggagcggagattttcaagctttccgcggaaatgggcacccctatttatttcgaagcgtccgccggcggcggcatccccattatccagagcttgcagaattccctgatttgcaaccacatcaattccattgtgggcattatcaacggaacgtccaactatattctctccgccatgggggaacacggggccgattacgcggacgccctggcccaggcccagaagctgggcttcgcggaagaagacccctccctggacgtcaacggctgggacgccgcccataaggcactcatcctggcgatgctggcctacggaacaaccatttccccggataaaatttacgtcagaggtattgagaatatcaccagccgggatttcgaatttgccaaaaaactgggctataccatcaagctccttgtcgtcatccgctaccatgaggagcaggaagacgctctggaactgcgtgtccagccctgttttgtccatgactggcatatcctggcttccgtgaacggcgtgttcaacgccatttccgtcaatggggacattgtgggggaaacgctgttttacggccgcggagcgggcaagaaccccactgcttccgccgtcatcagcgacatcatcaccgccatgcgcgaaagccgctatccggaataccatacgggcttcaatccctatgccaaggcctgcgggatcatgcatatcaatgatacggtcactccgtattacgtccgcttccaggtagcggaccagccgggagtcattgcggaaatagcccgcattctggccaccttcggcatcggcatttccgccacctcttccgctcccagccatattgatgaaggcggagccccctggaacgacctcgttttcatcctccattcctgcccgtggggccagctccagaaggctctggaggaaataacccgcatttcctgcgtggcggcggagccccgcgtcctgcgcatagaacatcttcttcctcaatcctaacctacatatcatcctgttacatggctcttatcgttcaaaaattcgggggcagctccgtcggcaccattgaccgcatccgcaatgtagcgcgccgcatccatgaaaccgccagggaaggcaaccaggtggtcgccgtcgtttccgccatgagcggcgtgacggacaagctgatcgggcttgccagggaattgtctgaaacgccttgcgaacgtgaacttgacgtgctgatggccaccggtgaacagcagtccatcgccctgctctgcatggccctgcatgaactgggtgaaaaagccatgtcctttacgggggcgcaggccggaatcaccaccttcggcagccacacgcgggggcgcatccacagcattgacccgacgctgatgaacaagtacctgcaggaaggcaacatccttatctgcgccggctttcagggggttacggaagaaggaatggtccagacgctgggccgcggaggttccgacctctccgccatcgccatcgcggccgctctgaaagcggacgtgtgccagatttttacagatgtggacggcgtctatacctgtgacccccgcgtggtcaaagacgccaagaagatacaaaccctttcatatgacgagatgctggaaatggcttccaacgggttcaaggtgatgcagtcgcgttccgtggaattcgccaaaaaattcggtgtcgtctttgaagttcgcaactccatgaacaacaaccccggtacaatcgtgcaagaagaaaccccctccatggaagccgtcgtcatccgcggcatttccattgaccgcaaccaggcccgcgtcaccattaccggcattccggaccaaatcggctacacggcccagatactgggcgccctggcagaagcggaaatcaacctggatatgattctggccaatactgcccacgacggctatgtccgccagtcctttacgatgccctccaacgaactgggccgcgcccaggccgcccttaaaccggtcatggccgccctcggctccaccgtcaaggtggaaacggaagcggggctggccaagctctccctggtcggcatcggcatgcgttcccactcaggcgtgggagccaccgctttcaaggccctggcggacgccaacatcaagaccggcatgatttccacctcggaaatcaagattgccgtgatggtggacgaatccgatattgaggaagcggcccggatagtacataaggcgttcaacctgggagcctgattttctcaatatttatcaactctcttttccgcgccggttcacgtccccgtaaaccggctttttcatgcggcaaaaaaagcagccccttcccggaagaggaacgccatcccccccgtttccttccaattttcgaatgaaggaagggagtctctctccgcatgctgttgcgggcggaatggccgtctcagggacacaggagaatgacgccgccctttccctgttccggttttaccggcttgccgcctgcattttttcagcgttcacataaaatccatacctccaggaacggaaattctccggttctccacgcaggaaagggaagtccttacgggtacggagcaaaaaaggcacaacaagcaaaaggttcatccacaggggatcaaccgccccccgcaccgcgcagtggctgccgcagccaatcccttctattgcacccgtatcgtctgctcaatcagttcgttcaggcgcggcgcagtaatgccgccgaccatatccttcagcttcatcccttccagatacagaaccgtcagagggacggcttccaggccatatttgcgagctatgtccggataggcatccgcatcaatcaacacggcaaacgccttgccgtcctgcgattcggcataagattttaccgcctggacgtaatccatggccgggcggctccacgaagcgtaaaaaacaaggagcaccttgcggccggataattccgtaagctgccgcatgtcctcacccttgtaatccatccatacgggggcctttttcttaggttttgaaggagggaggacttttttgggagggtcaaacgtcctttccagagggcgcggagcgggctttttttccgcataacgggcgcgccgttcactggaatcgtcgcacccggtcaggccggccgccagcaaaccgcagaccaatatgaacaagccctgtttcatccgcaggcaagtatgcccggagaaggcgaatttgcaagcctgaaacccatcctgcttttcgcgttgcccctcccccttctttctgttatggtgaaggttgcatgaatggcgtccctccactggaattcgcaggagtttcccactgggcggccctggccgtcctcctggcggcgggagcctgcatcctggagctggggcagtcctacaagaaaaccgtcagaaaccgcactaccttctggctgggagcggcctgcctgttcagcctggttcccgacctggccgccatgctggccgatgaaccggaaaagaactggacatggatgctccccctgcatttctgctccgtcatgcaggtggtgtgcgccctgagcctgtggataccctcccggcggctgcgctccgtggcctattactgcgtgctgtgcgccaccctccaggggctggtgactccttccgtggcccatgatttcccctcatggacgtattttgcctttttcctttcccacggcgtgacagtcatcacggcgctttacctgcctctggctctggaatggaagccggcgcgctgggacttcctgtgggcttttttgctggcgaatgcgtacctggtggccattcatcccgtcaacatgctcctgggaaccaattacgggtttaccgtggccactcccgccggagggtccgtgctggactttctcgggccatggccctggtatctgctgtggatgcaggttccggcgctggcgctgatgtatctgctcacactccccttccgccgttatcccaagggccgcacgggcagttccctgttccgccattgaaagggaatcttttttccctgccccgccgcttccgacggaatccccgcaaaacggcccgcccgcttccggaaaaaaagagccccggaaagttctttattgtataatcggcttgaggatgccgatgtaggtgtccgatgtccctgttccgcgataaatggaattaatcctgatcttgatggtatgcacaggctgcctgtaatacggaggcacgacgatctgcggagtccagtcatcccgcaacgtggcgtcaaaagtataagtcccgttcagcgttacctgaatgcctttggggcggctgaacatggagtaggcaatattcgggtgcctccgggcttccgaatccttttccgggtcggtcaccggggaaatgccggtctccagcatgattcccagcagccggccaggtttcctgagcctgatttccagggtttccccctggccgtccccggaaacgctttccgcccaatagccggaactttttttcagattgtccggggaacatggaaccccgtagggctccctgtccagggtggagctggcagtcacgtcatactgatccgtcaggacgcccttttctccgcggacggtaatccgcccatccttgtccagcacccacccgggccccggagtaagcaccaaggagggagcgtagggcctgccgtccgctcccagcagagaccaggtataaacgcctttgggcgtcgtcatgatggatttggcatccgcggagggatccagcttgacggactggttggtcatctccgagctgtacacattgaccaccgccctgggggtgccccctgtccaggtcattaccggagaggtaagcagcgtcaggcgcggttcccccatgtggaccttcggttccggcgtaatggcaacgtcctgcgtataaggaacggagaactggaaggtaagaacatggattcccgccttgttgggaacctgggccaccagccagtgagttatgccggcaatgggaaacatggagggagcgtccgcctggagatgccgcccctccaccagggaaaaatcacatttcagatcatccacggatgtgacgacgtcctgcaccgctttcgtaaaagggaggctgcgtatgggttcctgcctggcggcattggcctgttcatcaggcggttcgtactggaacggcacgcctacggaaatggttttccccctgattcccctggggatatccagcgcgcaggtgtaaatgaggaaagcctggtgctgcttcagggaaacagtaacgtccagcgcgttcagccggattccgtccgcctgcgtcaaatccatgggaacgggcaagccgggaaccggagcgatgcattgaaaggatatctcctgctggcgggggcggtccgctttttccgcggcggtctgttccttctgctggggttcggcggccatgcccggcacgcagcatgcaatgccggccagccagatcagggtagccaatctcatggccgttagattaacgcgtggcagcccgttcatcaagtccatttaggggagggggaaaggtcccttcgtacccgcccttttccctgaacaaacaagggcggccctcctttgaaccagcgacgcccgcagcaggaaaacattcgttccaaactccggaattggtcgcttcatgcccttggaagcgggttccggggttccgcctggacgtctctctgccggagaagcggaaagatggcccatggcacatgacaggtaaaaaccaactgaggagcatcggagggccttttccgccacaaaccagcataattaactcattaacaacaatcggcatccattgttgcatatttgcagaaagaccgtgttcttccgctttccaggcgccgttaacgtactcttattaccagggtttttcatgaaaagcccatttccgggggagagccaaaacgcccagccgcccccccttcgccaaacaaaaaagaagcatgcggaagacagaaaaaatcacgcaagacaggagaattttttctagaaaacagaacaaataatacaatatatagtgtatataaaaaaatactgtacaatatttccttttcatcaggattatttttcagtagataatgcacacgctacgcgccgccgccccatgacgaagcgcaaaagcctacgggattattcccaaacctttctacttcgcaatccaatgatcacagacaactcgcaaaccatactcaaactgcgtacaggccaggaaatcatcctcccccagaggaaagacctgctgggcggtttgaaattcaccagaagattttcacacaatgaagtccacccctatgatgaagtggactggacacgccgcgacgtccgcattatggattggaaaaccggcaagaccatttacgagcgcctgggtctggaagctccggcccactgggatgacaacgccgtcaaaatcacggcggacaagtaccttttcggcagcgaacccggctccctggaatatgaagacagcttccgcaatatctacgaccgcatttccaatacctataccgtatggggatgggaggaaggctacttcgccacgctggaggacgcggaaattttcaatgaggaaatcaaggccatgctggtgcagcagatatgggcgcccaactcccccgtctggttcaacatcggccactgggagcagtggcgctggggacgcccggacctgagggaaaactatacaggccacggcaacaaggcctaccataccaaagggaccaagaacaatctgaaaaccttcatgatccagtctacgtatgaatacccccagtgttccgcctgcttcctgacggaagtgggagacagcatggaggatattctggaccacctgacgacggaaggccgtattttcgcgtccggttccggagtaggcatcaacctgtccaccctccggtcctctaaggagcccatcagcggcaagggccgctcctccggccccatctctttcgaccgcggctgggaccgcatggccggagccatcaaatccggaggcaagacgcgccgcgccgcacgcatggtcctgatgttcagcgaccacccggatattttcgaattcatcaatacgaaaaaccgccaggaagacatcgccaaggttatcctgcgcgaacacaacgtgcatgtggagctcaagcagattgcggagaccaagctggttgccggcactccggcggaaaaggccgccgcccgcgtcattctttcccttcccctggccacccggaacagttttgacccgcacatggacgccctgctgtacggggaaacgctttcccaccagaacgcgaaccattccgtttccctgaagggggatttctggcaggcgctcgccaataacggcaatacctacacgcgctgggtcacgaatccggcccacatcgaacagacgttccgcgcccaggaacttctggaagccatggcccagtccatctgggacaacggggaacccggcgtgcacaataacgacgtgatcaacctgtggaatcccgtcaaatccatcggcaccatcactacgtccaatccctgctcggaatacgtcttcctgaacaatacgagctgcaacctttcctccttcaacgcctatcgcttcctgatcaagggagaggacggcaagcccgtttttgatgcggacgccctgacccacgccgcccgcctggccatggtctgcgcggacctgaatgtggaacgcggcggcttcccgattgaagaaatcgcggagggcacctacaagtaccgcaccacgggcatcggcttcgccaacgtgggcggctccctgatggccctgggcgtgccttacgattccgacgaaggccgctggattgcctcccagctttgcagcgccctgacggcggcctgctggacggcctccgcggaaatgggcgcggaactgggttcctacgtggaataccccgccagcaagaaagacctgctcgccgtgctgcgcctgcacaacgcagcccagaaactggcaagcgccctgccctcccagaaggactccaagacgctggacgacctgattgagaacatcatcgccaatgccggagggatcctgccggaagcgcaggggctcaccgcctcctatgccctgcatgcctacctcaagagcttcaaggcccccaccatgatgaacagggagcgcatcgcccctgcggccaagctggcggaagccgcttccgacatgtgggcgaaggtgatcaaggccacggcgcaccgcaacgcgtttgtttccgtgatggcacccacgggcaccatttccgcccctctgggctgctatgatgaaggcactacttccattgagccggattacacgctggtgaaatggaagcagctggcgggcggaggctccctgaagatgttcaaccgcctggccctggaaggcctccgctccctgggttacccggaagacttcgtcaatgaagccgctctggaagtggcgggcttggacggcctgatttccgcgttccaggggaatatggattacgtcgtgaaccagctcattgtggacccctgcaatgaccaggccggccccgtgcgcctcgcgtggcgccgcctgctctccggaacggaatcccgcagtgaaattcaggaaaaagtggcttatatcagcaacccggccaacatggccgtgctgacggcggatgaactcgccgtagtcaacggagccgcccatattgaatccataccgtggctgaataagaaggacctgccggtctttgactgtgccgccaccaacggcaacggcatccgtgccatttcccccgccggccatgtgctgatgctgggcgccctccagcccttcatctccggcgcgtgctccaagacggttaacatgcccgtctccgccagcgtgcaggatatttacgattccctcatcatgtcccacgagctgggcgtgaagtgcatcgccatcttccgcgccggctccaaggcgaatgccgtttacgtggtggataccccggaaacgcgcatgttcaaggccaaccatgtctgggaacagctggtgaatgccggatcggacgccattgacgaaatcatcgcggaggcatccaagccgcgccagcgcaagctgcccggccgccgtctgggccagaccgtaaaattctccgtaggcggccagctgacgggctacctgacggtaggcgtttatgcggacggcacctgcggggaagttttcggacgcctgggacaagtcggctccttcgcctccggcatgtttgaagcttactgcaaactcctttccaccgcccttcagttcggcgtgcctctcaaggaagtggtcaagggtttccgcaattactccttcgagccctccgggttctgccgcgtgggggacgacacggaggcggacacctgcacggaaatccgctcctgcgcttccgtggtggatttgattgccaagatcctggcgtggcttttcccggaaagcaacggctaccgcctgcgggacgtattctccatccccagcgtcagccttccgggccaggctccggatacgacggtaagcgtgctgcccccccgcatcatcaccgctccggcgcatcccgctactccggccctgccggaaattcccgccggaaaggttccggaaggaacgatgctcaacggcgcctccctctgcccgcagtgccactccctggcctatgtccaggacggcaaatgcaaatcctgccgctcctgcggatacaaggacggcggctgcggggaataaacggtaaccagatcattccatacccgctctttccaggcggaacccggcagctgccgggttccgcctggtgaatttacggagaaggcattctttccgggagagacggttttccggccctcccggctcccgcccggcatgaactttccggaaagaagcgaacggaaaccgccacgtggggaaaaggaatgataggcgtttgccttgaaatccggcagcatttcattcatagtccggcacgtacgcctgaagccgttcccacattttccatgaaaccctactataccctggccgatcttctggatgaagaacatccgtttgacaccggggaaatcgttcccgccagactggccgtaatcggtttccccattgcccattccaaatcccccgccatgcagcaggccgcactggatgcggcgggcattcgcgcccggtatatccgcatccaggccgctccggaagaattcggggaggtggtgcggctcctcaggaaaaggggattcacgggggccaacgttacggttccccacaagcaggcggcctgttccctgtgcagtgacacggacgccctttcccgcgctaccggctccgtcaatactcttgttttccaacaggatggttccgtctccggattcaatacggacggtccggggttcgcccgcgccatccgggaggaattttccgtggatttgcgcgatttgaaagtggcccttctgggctcctgcggcggggccgggcttgccctggcctacacctgcgccatgcagcgctgcgaacggctgacgctggccggaagatcggaagaaaagcttcaggagcttaaaaacaggctgagttcctttttcattgacgaacacaggctggaaggggcctccgaccgcctggcggcccaccagaacaatacgccccgtttcaatgccgccgtggaggaagcggacctgatcgtcaacgccacctccctcggcctgaagcctacggacccttcccccgtcccccctgcactgctttccgcccaccatctggtttatgatttacagacacatgacgatgccttccagatggaagcccgctttcagggcgccagagtttccaacggcctttccatgctggttcaccagggggccctttcctttgaacgctggttcggcatcaaaccggatatttccgccatgcgccaggctcttgaacaaaagcatgactgacggcaccccccattttaacgtacatgctttccggaacgcgctggtagaatggttcaggcgcgaagggagggattacccgtggcggcggacaacggatccgtggcacatccttgtttccgagctgatgctgcagcagactaccattcccaccgttttgggaagatatgacagatggatgcgccagttccccactccggcgcatctggctgccgtggacgaacagacggccctgcgctcctgggaagggttgggctattaccgccgcgtgcgttccctccaggccatcgccaaggaaatcgtcaacgaattcggagggcggttcccggacaatgcggaagggctgaaacgcctgccgggcatcggcccctacacgtcgggagcgctcctctccttcgccttcaacaaggcggctcccattgtagacgccaatgtcgcgcgcgtcctagcccgcattgacaattattccgttcccgtggattccacggaaggccagaaatacctgtggagccgcgcggaaagcctggtggatccggaacatgcccgtgaattcaattcagccatcatggaactggggcaaacctgctgcagcatcagttctccggactgcctgctgtgccccgtgcgccccttctgctctgcggaacggccggaaacgcttcccgtcagaaataccaagcctcaagtcacccgggtggaacaccacgatattctttacatccgcggcaaatccgtcctgctggccaaatgcccggaaggcaagcgccatgccggcatgtaccgcttcccccagagggaggacgagcacaccctttccctgccccatgtcctgaaacaaacctacagcattacccgctacagggtgacccgctacatccaccatgtgacggatacgcctctcctcagggaaggagaggaattcgtgccgctggacaaaatccacgggctgcccatggcctcaccggaccgcaaggcactgaactcccccgccctcggcaaactgctggaccatatcagatgaatgacagattgacgccggaacttgtcctctccgcctattgccaggggtgttttcccatggcggacccggaaacgggagaaatctccttttacgaaccggacccgcgcgccctgattcctctggacgaccgcttccacatcccccacggcctcaaacgggctttgaataaaaaaccctttgaactccggatggataccgcttttccagaggtgatgcatgcctgcgcccggacggaccagccggaagaacaatggatagacggacagattgaagaagcatacggcaagcttcacgagatgggcttcgcccacagtgtggaatgctgggacgaggaagggctgcagggaggcctgtacggagtagccctggggaaggcttttttcggggaaagcatgttccaccggaaaacggacgccagcaagatcgccctggtggccctggtgcaatacctgcgggcgcatcggttcctttttctggatacccagtggacaacgccgcatctgctgaaattcggaacctatgaagtgccggccagggaataccggaagcttctgaagagggcgctggaggaacaataaactatattttactgtccggtataaacggtcatgagattgattcccaattatgggagatccggcagcgcaccggatttcataacctgctgatgatttttcttcgggctttgccatcaatacttgccccccatgccaccccttacgcccaaacgttcaggaagcatggctccggcataaaaaacgccggaatcgacattaacggcactccgggaaagactgcggagcattttgggaaagatgcacttcctcttccgccaggagagcttcggcccataatgccattaacatgatttcttgcagcaaggcggaagccgtcaaacatgcccaaaccaaacgcatggagcagtttggcccgcaaggttcaagccatatctgacaagaccgttccatccgctaaaaaagcccgtggttccgaagaaccacgggctttttattaacccttaacaaaaaggtttattcctgttccagagcagcctgggccgcggccagacgggcggtcgggacgcggtagggcgagcagctcacataagtcaggcccagcgtgttgcagaacttgacggaagcggggtcgccgccgtgttcgccgcagatgcccagcttgatgtccgggcgggtggagcggccgagttccacggcaatcttcatcagcttgccgacgccgttctggtcaatggaagcgaagacgttcttcttaatgatttccagttcctggtactgcggcaggaaggagccggagtcgtcgcggctcatgcccaggcccgtctgggtcaggtcattggtgccgaaggagaagaactgggcggtttccgcgatttcgtcagccgtgacggcagcgcgcgggatttcaatcatggtgccgacgaggtagtccactttggcgcctttttcctcaaatacctgctgagccaccttgtcaatgatggctttctggatgtccagttccttcttgaaggccaccaggggaaccatgatttcaggcaccacggcaaatccttcttcttgggagacttccacagcggcttcaaagatggcgcgggcctgcatttccgtgatttccggataggcgatgccgaggcggcagccgcggtggccgagcatcgggttgaactcatggagttcggacacgcggcgcatgatgacttccacaggcatgccgattttctgggccaggtcaagctgctgttccttcgtctggggaaggaattcgtgcaggggcgggtccagaaggcggatggtgcccggcaggcccttgagcgccttgaagatgcccttgaagtcccccttctggtagggaaggagcttggaaacggcggctacgcggtcgctcttcttggtggagaggatcatttcacggacgaagtcgatccggtccccttcaaagaacatgtgttccgtgcggcagaggccgatgccagtggcgccgaaggcgatggcggtttccgtctgcttgggagagtccgcattggtgcgcactttcattttggtgcagtcgtcgcaccactgcatgagcttggcgaagttctggtaggtgcggctgtcttccggcttcatggtcttggaaatcaggacctggatgatttcagagggggaagtttccaccttgccggcgtataccaggccgctcgttccgtcaatggagaggtagtcaccttcgctgatggttacgtcgccaacggaaacggtgcggttgttgtagtccacaatgatttcatccgcgccgcaaacgcagactttgcccatctggcgggcaacgagggcggcatgggaggaaacgccgccgcgggcggtcaggatgccttcagcggcaatcatgccgcgcaggtcttccggagaggtttccagacggaccagcagaaccttttcacctctgtccgcagcttccacacagcgttccgcgttcaggtagatgcgtccggtggcggcgccgggcccggcgggaagaccgcgggtcagaaccttggcactcttgatggcttcacggtcaaagatgggggtcagcagctggtccacctgatgcgcaggaatgcggcgcacggcggttttccagtcaatcaggccctgttccaccatttcacaggcaatgcggaaagcggccacgccggtgcgctttccgttgcgggtctggagcatgtaaacggtgcggtcctgaatggtgaattcaaagtcctgcatgtcatggaagtggttttccagcacttcgcgaatgcgcaccagttcattgaaggcggcgggcatcacttcatgaagggcagcaacgggggcgggcgtacgcacgccggccacgacgtcttcaccctgggcgttcatcaggaattcgccatagaattcgttttcgccggaggcggggttgcgggtgaacgccacgccggaaccggattcctcacccgtgttgccgaagaccatggcctgcacgttgacggcggttccccattcggacggaatgccgtatttctggcggtacacgatggcgcggtcattgttccaggaaccgaacacggcgccaatggctccctgaagctgttcccaggggcattccgggaattcatggccggtgcgttccagcaccagggccttgaagcgggagacaagttccttcaggtcatcggcggagagcttggtgtcttccacgtcctcgctgccgaagcgttctttcttgatggcggcgatggcggtttcaaagggttcgtggtcttcatccggggttttctgcacacccagcaccacgtcgccgtacatctgcacgaagcggcggtagcagtcccaggcgaagcgggggttgttcgtagccttcaccatggcttccacggatttttcattcaggccgaggttcaaaatcgtgtccatcatgccgggcatggattcacgggcgccggaacgcacggccaccagcaggggcatagcttccgtatcgccgaacttgcgtcccaggatctgttccattttggcaatgccttccttgacctgcgcgtcaagctgggcgggataagtgcagccgtgatcgtagtagtaagtgcaaacttccgtagtgatggtgaatccgggagggacaggaaggccgatgcgggccatttccgcaaggttggcgcccttgccgcccaaaagatttttcatgctgccattgccgtcggcggatcctccgccgaaagaatagacgaatttgtcagtagatgcgctgcacgcgcaggaattggtggacatatcgattattgtagtcgaattaatgattctgcccaaacatcgaccaaaggagccaacaaaagacccaatagcgagttagggtcgaataaggatgccttcggccccttgctttgtcaatccgaaattgtacggaaaacaaaaatatttttcagagtttttggggaaaagaatgcatgccaaaaccctgcttttccagcctgtcccgtccggagccgctcttcctccgggcaacgccgcttcctgttttccggcggccccggaattacctgggaagaaaagcgcaacgagtttcttttcatggctgtccggaaaagaaaaacggacgcttatcaaccggataagcgtccgccggaaataatatgtcctgttttttatgccttgcagaaggtgtcttcatccgcacagtcagcctgaacccacttgacggaggaatcaccggaagctatatgcacaaggcaatggtacacggcttcctggtccgcatccagccgggcagccatctgggcggcggtttccggggcggttcccagagccccccttaccctgcccagcagggccaggaaggaacccgccgcttttttgccggcttccacgccgggctggtggtaggcgttgatgttaaccagggaagcatagaaggaaacagcgcgctcaaacagggcaatcagcatgccgagcgttttggcgttcacctccggaatggaaatggtgatggaggaacggccggattccgccagcgcctggcgggtgccgcgcaggaagccctggaggaagtctccgcaggtggcgcccgcctccacttccaccgcatccgcggaacattcgcgcacttcaatgaaggtggcgaagaagttgttcacgccgtcacggagctgctgcacataggcatgctggtccgtggagcccttgttgccgtacacggaaatgccctggcagacttcgttgccctccaggtccagccgcttgccgagggattccataatgagctgctggaggtatttggagaagagcaccagggcatccttataagggagaaccaccatatccttttcccccttgccgccggtggccttgtaccaggccagcgccagtttcatggaggcgttgcatttcacgcagtcccggcgggtcttttcgtccatcaggcgcgcgccttccagcaggtcatccacgttcacgccctgaagcacggcgggaaccagccccaccacggacatgacggaggtgcggccgcccacccagtcttccatcgggaaacgcctgagccagccttccgcctcagccgttttgtccagccgggaacccgttcccgtgacggcgaccgcctggggtgcgaattccagcccgttcttcctgaagaaatcctgggccaccagcatgccgttgcgggtttccggcgtgccgccggatttggaaatgacaatgacaagcgtttcttccagagggagggattccagcacccggtacatgccgtccggatccgtgttgtccagaaagaacatgtccagccctgccgccgggatggcatccgccaccagctccgggccaagagcggaaccgccgatgccgatgacgagggcggcggagtattgttccgcgcggggaggcgttattttgccgtccagaacgtcccgtccgaaggctttgacgtccgccagggggccgtcaatggcggctttcaactccggcgtgggagccagggaggagttgcgcagccagtagtgccccaccatgcgtttttcatccggattggcgatggcgccggattccagcgccttcatgtcggcaaacgccctgtctatccgtccctgcatggaagacaggaatgcgtcgtccagcggaagttttgaaaaatcaagggaaatgcccagttcagggtagcgaacgagttgttgtgcgtataagctcatgatggtcatggattggaaaaagggttaccggagttttttcaggatgcttttggcctgcacgtcgccctggtccgccgctttctggaaccattcccgggctttggccatgtccttgggcaggccgaaaccggtctgatacatcacgcccaggttgtattgctccgaggcatagccttccgcagccgcccggcggcgcgtgcgggactgttccctggcttccgcagcggtaaggcccagaacccgcgccgcgtccggccacgcggctccgaatctggaagcggaaggggcatagccggcagctccggccttgcggtgcatttcctccgcttttttcttatccctcttcacgccgtatttgccctggtcatacaggaacgccatgccccagtagccacgggggcagcccagctccgccgcctgctggaagcattcaaaggcatcttcatattttttggaacccatggcgcgcacggcgtcggaaatatggagttcagcctccttcaagcctgggaattccggaatagccgcccattcccttttcagttcctccctgtcccttttggacttgggaggcatgccggacagatcggaaaaacggaaaagggggaagtaaccctccatggctcccatgttgcccagtccggacatcagaaaaacgccgggagagaccttccacatgtgcatgtactggatgcggccttcctgaagggattccctggccacccactccggcatgttcgccggttccccgaattgttccgtcaggcccaccagaagagccttataggcggatttcagcctggtctcatattcggaaccgcggtatttgctccgggagtagaggacaacggccctcaagccgccggaggggtcatagtcaaagttcagggaaaaagtctggccgcctatggactgcctggttttaaacacgccgttgagcccggtgcgtgaaaggagggcgtccgtgggcggcccttcaagctgcttgctccgcctcagggttttcagcacctggtccttgtccattcccacctccagtccctcataaagggcggcaagcaaaggggaacatgtgagagcgaagagtccagcaacataggctagttttttcatagaaaaagcaattgggcggttttctaccagaccggaagagttttcaaaaggataaaatgcgtcagcgatggagaggaaaatttttcataaaatattcatttccagtctacccacagtcttttcaaataatcctccccggagaaatccgggggcatggggtcatgggtcaggcggaaaccgggaacggcacgggccaccatcctgcggaagtcctcgtggcccagcttgcggcagttgctggtgcacagcatccagccgcccggttccaggcattcgcgagccagggccaccagctccccgtagtgggattccacccggaacacctttccgcggtcatcccgggaaaacgtgggagggtccagaataatgccgtgaaaggtgcggccctgcctggcgaaccgttccagccagcggcgcgcgtcccccttgcagaaatactgggcggagggctcaatgccgttcagcatgaaattttccctggcccagtccaggcacggctgcgccagatccagcgtggttgtctgcgctccgcccagggccgcataaacggaaaaggctcccgtataggcaaaagtattcagcaccctcatgcccggagcgcttttttccctcacccggcggcggtggtcgcgctggtccagaaaaattccctgggaataaccggcggacatgtctattttaaaacgcactccctgctccaaggccgtgaattgcaggggaaggagcggcccggcgatctggacgggcgcttctttctggttttgttccagttttttgtggaatacgggcatgcccgtatcccggagttcgctttccaggtctgcaggaatggaacagccgcgtgtggagacgagaatacgatccgccatctgatccacaaagacaccggggattccatcccctgccccgtccatgacccggaacatatccgtatccggcggaatcaattccctgttgcgttccacgcaatgatgataatttctctccacggcggagcaaagagtaacggatgaagaacgttcccgcaatgtcaaagaagcaggagcctcatttcctccggggcaagagttccgccagggaaaaacggtcacccggacggccctccttcaccaaaagagacattaaaaaaccgcctgcaaggcagaaccttgcaggcaacaacatttttaactgccggaaaagaggttcttaatctcttcggcggcggcgagccatcagggccaccagccccagcaggctcagggacgccgtggccggttccggaacgctggctgtttctccggaaatagccagagcattgaacgtaggcgtgtgagcggaacccggagtattcaccgtcagaataatttcgccatcttcattggcaataacgtcactaatggtgtaccccgtgggagtccgggcctgaattgtctgagagttcgcacctatggaaggatccgcgctgccgtaggtattggaagtcaccagggaattccaggcaccggccccctcaaacggacacccggtaacaagggcaatctggtaggaagcaccagccaccagaccggaaatagtcagggaaagagaagctcctttggggccggagataaaggtctgccaagagtttccgaaagagatctggttttccatgaaagaatccaatccctgtgtatcaaaagaagttccggaggaaacccagtccccagaagcggcggaagaagcagaacccagattcgcggaagaggatgccgtagccagggttgcaacaaatcctgaaccggaatcggttacagaaacagtcttggcgggagtttccggaaacagagaactgttaaaatcaaataatacagtagcagcactcgcggaaagcgcggataccacagccaacatggaaatagaggcgattcttctcataaatagcaggtaaacagcaactgatttcagtcagtaacggattgactatccggtgtcaaattattttttaaaaaaagaggggggttatgcggacggaacagatgaaaaaacggagtatagaaaaaataataaataaaaatatctccaaaaatattagttgcgacgtttattttaaataaataatatgctatttattatcaataatttgaagtcgatagtagctgctactcctgaatattttcaatgtccgctttttttcaccggatagtcaatccgctcacaaaaaagaggccggatttttcatccggcctctcgcaacaggtatttacctgataaacaggaaattccgtttagtcagcgtactgttcgttaagagcttccatgatttccctggaagcttccggaatgttggtgcccgggccgaagatggccacagctccgtgttccttcaggaagtcatagtcctgggcgggaataacgccgccgcagaagaccaggatatccggacggccctgcttggcaagttcctccaccagggcgggaaggagaaccttgtggcccgcggccagagagctcatgccgatcatgtgcacgtcgttttcaatcgccattttggcagtttcctccggcgtctgaaagagcgggcccacgtccacgtcaaagccgaggtcggcataggcggaggagaccaccttggcgccgcggtcatggccgtcctggcccattttggcgacgaggatgcggggacgacgccccgtgcgttcggcgaagtcatccgtcatcttgcggacttcctccaccagcggatcttgaccataggattgagcgtacacgccggtaatgagtttgattggtgctttatgacgcccgaagtgtttttccagggcggaggagatttcacccagggaggcgcgggccttggccgccttgatggcaaggtcaaggagattgccttcccccgtgcgggcgcattcggacagggcttccagcgcggcttcgcacgcggcggagtcccgttccgcgcgcagtttctgcaggcgggcgatctgggcttcccggacggtggtgttgtccacttccagaatatcgatctgggcttcctgttccaggcggtatttgttaacgccgatgatgggttcttttccggagtcaatggcggcctggcggcgcgctgcggcttcttcaatgcgcatcttgggcagcccggtttcaatggccttggccatgcctccgagtttttccacttcctgaaggtgggcccagcccttgcgaatgagctcattggtcaggtattccacatagtaggaaccgccccacgggtcgattaccttgcagatggtggtttcatcctgaagatgaagctgggtgttgcgggcgatgcgggcggagaagtccgtcggcagggcaatcgcttcgtccagagagttcgtgtgcagggactgcgtatggccgcaggcggcggccagggcctcaatgcaggtgcgggtgacgttgttgaacgggtcctgttccgtgagggaccagccggaagtctgggagtgcgtgcgcaaggccagggacttcgggttcttgggattgaactgcttgatgagtttggcccacagcacgcgggcggcgcgcattttagccacttccatgaagtaattcttgccctgggcccagaagaaggaaagacgcggcgcgaaggcgtcaatgtcaatgcccgccttgatcccggtgcggacatattccaggccgtccgcaagggtgtaggccatttccaagtccgccgtcgcgccggcctcctgcatgtggtagccggagatggaaatggagttgaacttgggcatgtacttggaggtgaactcaaagatgtccgcaataatcctcatggagggatcaggcgggtaaatgtaggtgttgcgcaccatgtattccttgagaatgtcattctggatcgtgccggagagctggtccagcgtgcagccctgttcctgggcggcgacgatgtagaaagccagcacgggcagcacggcgccgttcatggtcatggaaacggacattttgtccaggggaatgcccttgaagaggatttccatgtccaggatggagtccacggccacgccggccttgcccacgtcacccaccacgcgggggtggtcggagtcatagccgcggtgcgtcgccaagtcaaaggcaatggaaaggcccttctggcccgccgccaggttgcggcggtagaaggcattggattcctcagccgtggagaagccggcgtactggcgcaccgtccaggggcgcgccacatacatggtggcatacggtccgcggaggttgggagccacaccggccgtaaagtccaggtgcaggcagtcgtcgtacacgctttccgagtaggtgggcggcacgggaatttgttcattggtcatccaggtttccgtttcggaagccggggacggggcaccagccttgatttcaggataggaggcggatgcaaaatcaggaatattgctcattgggtggaataggttggtggttattaaaggccgattttgttttgaatggcttcaacggtgttgtagcagttggccttgacgtggatgaagatgtccacgccggcttccttgaatgcttccacatagtcggccggataaccggcaagggccaccatcatgtccggtctggtctccctgagagccttgcagaaggcggggacgatttccggataagtgtcatccgtggagcagatgacgcacacggcgcagccgctttccgcagccgccctggccgcgtcttccggagtttggaagccggccggataaaccacatccagaccgccggcgcgcaggaagtcgcgggagaagtccgcgcgggccttgtgctggcggagcggccccatgttggcgaagaagaccatcgggcgggaacccttttctgccacccaggcgtcagccttggcgagcagggattcaaaacgttccgccaggcggcgcttcggcagggcttccatttccaggggttcgccgcacttgcagtcagcgccggccaccagggccttgttgatgaggcaggtggaaaagccttcttcggcggccttgcaggcggagtccacgctcatttccacgaccgggagctgaatatccgcattcttgcagcagccgtggcccttgtgggcggaacagcaggagccttccggaacttccagctttttctccgccaggttgacatactggttgacgcccacgatggactgccggcgctgatccgccagctcgtaacgcctggcggcggtggcgttcaccttcttctggatgctgccggctttgagggccttgacgatgccgccttccttttcgatgccctggaagaattcccatatcttccgggaggcttcatccgtcaggttttccaggtaccaggaaccgccggcggggtcaacgaccttgtccagattgcattcgcccagcagaatcagcgggcagttgcgggcaatgcggcgagagaattcgtccggcatgcgcacggcagcgtcaaagggaagaacgtcaatactgtccacgccgcccatgatggcggagaacgcctgggcggagccgcgcagcaggttgacccagggatccaccttggagagggtccagaaggaggtgcgggcatggagcttgattttggcagcttcctcgctgccgccgcattcttttacgatgatggcccaaagttcgcgcaaagcgcggattttggcgatttccaggaacaggttggcgccgatggaaaccgtaaagcgcatgtgcgccgcagtttcatccacggagaggccgcgttcctccatggcgcgcaggtaggccacggcagtagacagcatggcgcccacttcctcaaaggcggaagcgccggagtccgcgtaaggcagcccgctgacgccgatggtctggaagccgggagcgttggcaacggcccatttggtcatcacggccatctggtcatagtaggcgcagatgcccttccccccgcaaagggagcccttcatcacggctttccccaccgggtcatacagaacgccgcccttgaggtccgccgtcttgacgccggcggccttgcaggtgttcaggaacatggagagggttcccaggccgcaggaaccgggagtgacatatacgggaagcccgtccagccggacgcccctgagggccgcatcccagtcagcctgcttgcgcagcttcaggccgcatttgcagttgagctgaacgtttacggcggtcaggccgcggtccaggtcatgcagaagcttggcgttgaagtcttccggagaggaagcgggaatgctctgggcgatttcgcagggcttttccatatagcccagggcgcgcgttccgcggcggtacggaaattgcccggcaggcattaccggggaatgttcatcccatttgttatagatgggatgcagggtaattccctccacaagcttggtaaaaagcttcttgtcaaaatcagcccctttcagggcagcgactgctgcctcgcgccattcggcgtatgtggctggtgcgaattctccgaaatcaatttccggagccgttgttttatttccctgttgcatggcgaagtcaatgggtaaggcctaatatgttggtttttaactatgcgcaaaccaggccaagtttaaagcgcaacattattttaggaaatcaaagtgtaaagtccagcgagaaaaatactcccgtccgcccgcaaatgcgaatttgcttcatcacgcgaggcaaacttgcaaaaacgatatccatggcgtaaatacgggaataagcatgcccccttctactaccgtcaaactccctccccagctgatccggcagctccgaactttccggcgccgcctcagaacggtgaagatgctggaagccgtatgccttgcaggcattgccgtcattctttcctacgcgctcctgtacctttccgacagattgtgggagacgccccccgccgtcggctggctcctgtttttcatcgccgtgtccggcctggcggtgtttattccctggtggagtttccggtgggtgtggcagaggcgcacggaatcccagctggcgcggctgatttcccggacggacgcagccctgggggatcgtctcctgggcgtcatcgaactggattccgaaaagcacggccgccaatacggttccgaaaagctgaaagaggcggccatggagcaggtggcccgcgaagtgtccgcccgggacctgacggcgaacatcccccggcccagccacagaaagctgttcgtcctgctggcggttctcgccgcatgcacggcggccgtatgtgcagtaagcccggaagcggcagggaatgccctgaaacgctgggtccgcccgttcaatcctccggaacgctatacgttcacccagctggcccccaccccggattccctggtcattcccctgggagagagctgcctgtatgagatccggctggcggagggaaccaaaacccgcccgcagacggcagagtattttttccgcaacagggtgagccagcaagcgcctcttgcggacggcacatacaagatccacatcccccccatgcaacaggcggacaacctggagttttttgcaggggatgccgtgcgacggctgaacatcatcccgaaggggcgcccttccctgctgggagccgaagccggcgtggcctatcctgcctatatggcgcgcgccaacggcagggaagccatgagagcaggtgttatttccgccccggaaggctctacgctgacgttgaaggtgtccgcctcccagcgcctgcagtctgcggaggatgcacagggccagccgctccgggtggacggaagcagcgtcatcattccgaacatccttttggagaaagagcccagggaaatagagcttgactggatggacagcgacgggctggctgcttcccggcccgtgaagatacgactggaacccattgaagacaaacagccttcaatttacctgagaggcggcgaaaacgaccgctacgtgctggaggataccagcattgaactggaggtagaggcggcggacgatttcggcctccgggaaatgggggtggaatggcagggtgaaaaatccttttacgacggcaatgaggatgaaaacggggcctcagctccaaaaccggccggtgcggacaaaccggcgcccggcctccgcggggagaaagtgctggcggacggacagcccacgcagaccgggctgaaaggaacattcctgttccaggccagggcgctgaagttatctccccagcgcgtcgtcatccgcgggtttacgcaggattacaaaccgggaggcaggcgcgtttattcggaacccatgattattttcgtcctttccaagtccgagcacgcccagatgatccgcaatgaactggaacgcatcaccagcgagctggaaggcatgatccgccgcatggacgccatggcggacgaggcaaaacggctgaaaggaatggaaagcggcaaattgaaagatgcggagtcccaggaacgcctgcacgccctagccgatgaagagcaggccaacaggcgcgagttgggagacttgctcaaccgctcggaaagcctgtttaaagaagcctcccgcaattcccagatagacccggccggcatgaaggaattcatgaaaggaatttccatgctcaaacccattcccgacggacccatgaaaatggcccagaaacagttccgggattccgcctccgagagccgctccgagcaggaaagcaggaaggacctgaacgacggggagaattcccattccgaagccacacaggcgctgaaagacaccatgaaccagctctccaagtccgcgcaggacatggaggccagcacattcgtggcacggctcaggcaggccgcatccaaggaggattccatcgcccatgcactggccggccaaatcaacaccattgcgggcatgaccatggaggagcttgacccttccaccaggcgtgaaatggaaaccatcgccacccttcaaaacgcctccacgcaggacataggctggattctggaagacctcagctattacaagtcacgcaccggagagcgcatttacagcgacctgtacaaccagatgaacgctttctccctccgggataagctggacctggtgcacggcaatatcctgaacgcaatcacggcccgctccattgacgagtcccgcctgtatgcctccaccctgcgccattgggccaaattgatagacgactataagaagagccgccgcggcggcgggggaggaggcggcggcgggggaggcagccagtcctccatttccgacgccgagtttgaattcatgctgaaactcatccgcatgatccaacaggaacaggatatccgcatgcgcacccgcgccgccgaacaggaacaccgcaaaaaatttaccccacctgccccatgaataccgccaatttcccagccatgattctggcactttccctgccctgcgccgccgctccggcccctgctccggaatattccgccaagcacaaggaaacggcatccaaactggcagtacaacaggacgagctccaggcggacacttccgaccttatcctgggagaaaccaatgaggaagtagtggaactgctgaaaaaatgccgccatgccatgaatgacgccgtggacctgctggaagtttacaataccggaggccagacgctggccgcgcagtcggatgtgattgaattgatttaccaggcagccaaggccaagatgaccggggccgacggccagcccaagccgggaggaagagctcttatggacatgctgcgccagctgctcggcatggatcatgacgcccagtccgcagaacagcaggaaggggatgaaaaagggcaggaaggttcccaaaaaggcagcggcaacaattccggacgcggaacgaatggaaaatccaatatggcctcctcccaggataaaggcgtttccaatccggacacggctgtggaaacgcgttccgttcccaaatccaccggcatgtccgcagacgacatgccttccggattccgcaaggcgctggacgcctacaacaagactttacagaggtaaaacgcccctctccggacacagccctttcacgcatgaacagcaacttcccgtttccatgaaaaatccccgcctcctgcttaccgctttcttgacctgctgcatgacggccgcaccgcaaaacgcagcggcccaatcccccatgagaacgtcttcttccgtgcctccccaggtggaactgatgtatgtgaaggggctacgctatcttcagaatgcccagaaaacggatggaacctatgatggaacttacgggagggagcccggcatcatcggcttttgccttatgtccgtgctggctcacggagacgatccgaacgcggggccgtacgccaccatggtgcgccgctgcgtagattacatcctgtccaagcagaacaaggtatccggctacattggggattccatgtacaaccacggcttcgccactctcgccctggcggaagcctacggcatggtgcgggacgaccgcataggccccgccctccgcaaggccgtagctctgacactgaccgcccagaaaaaaaacaaaacgggaggctggcgctattccccggaatccacggacgcagacagcacggtgaccggctgccagatcgtctccctgttcgcggcgcgcaacgcgggcattcccgtgccggacgaggcttttgaacgcggcctcaagtacatggcttcctgccgcgacaagaaaggtgcctacggctacaccgggccggcgggcccccgcgtcaccctcacggccatcggttccctgacgctgtccctggcgcgccttaaaacggacccgtccttcaaggattccctggcctacctgaaaaagcacctgaattaccgggattccacttatccgttttattttgaatattacatgtcacaggccctgttccatgcggaccaggaagtgtggaaggaatggaattacaaaaatatgcgctatctgggagcctcccaggcgcccaacgggtcctggctttccgatcattccgcggcatattccacttccgccgccctgctttccctcgcgcttaattacagatttctacccatctatgaacaatagaatccgcctttccctgctgctggccccagcctgcctgctgaccgcttgggccaattccgtcatcgacgtggttacggataacaattaccgcctccgcggggaaatcatttcttacgggaaacagggcatcgtcatcaagcacccggccatgcgccagaacgccgtcattctcccgtcgggaatccgcgctctttactttacgggaaccgcctctccggatcttcgcgcccgggacaaaattttcatggctgcggggcacagggacattatcccgtgcaatatcatttccatcacacaggacaaagtgcagtatcgggacatgctgggccatgaacgttccgttccccgcagccaggtggccgggttccggctgaatacgctgcaggaaaagggcttctggcaggaaccgctgatttttgacaacagctgggtttattccggcaaccgggaggaagactaccgcacccaggcggggagaaaactgatgaatgccctgaagccgaaagtccagggagacaagtaccagtaccggctgggcaacaatgattaccccacctggatacccctgtacaagaatatcggcctggatccttcctcctttaccttccgcaccaccatcaccatggacggcaataatgaccgctccggcattgtcttctgtttcggggggaatgaaaatattcctttccgatccaattccggcagcaacctgaacaggctcatgctcagcatctcgcccggaaaatgcaccctgctccgggaacagaagtccggcatcctcgtgctgggggaagcggccattccggcccccattctgacggagggcgtggatattcaattgacagcctcccgccagggtggaaacaagcaggtttacgagctgttgataggcgatctgccgcccagactgataacagaccccagcccgccggaacagccattgcagggagacgccttcggcctccagatggaagggcacgtgtccctgaccatcagtaaactggccctttcctccatcaccctgagcgccaaatccgtggccaaaaacgggaatgcagagacagaccttgtcctgacaaaggaagaagacgccattccgggttccgtcagcggttacgacagcaaaaccggaacgctgacgctttccacggacaaggattatccgggcattccccgtgatctttccatcccggccaagtatctggataccgtcttttttgcggaacagaacaggaaagacgactcccgctccccagcccgccacagcctccagatgaaggacggttcccgcctgcacggagatattctgagcatggattccctgaatatcatcctgcggcatccgcagctcggacagatttccctgccgctgaaaaacatcacccgcgtggaattcctgaatcccgcccagccatcccgttccactccctgattgatcccgccatgaaacaggcaattacgcttttcctgtgcgcctgcgccctgccgaccgccctccttctgccccatgctcgtgcggaaggtgtcattacgcttaaatccggggaaaaactgccgggcagcatggatacgatgaaccgcccttacctaaagatccgttccagcattctttccaaacccgtggatgtccatatgggggagcttgacgagctggcctcttcccgtccgctggaaataccggaacagttttccatcatcaggctggccaatggggacgaggtttacggcaccctgaaggcgctggatgcggaaaatcttcaactccaaaccgcttggggcggcctgcttcaggtggaccgcaaatatgtgcgccacatcgggttcgactcacagaaagcctacctgcgcaacgctacggaatccctgcagggctgggagtcttccgccaaaagcacgctgcccgaatgccgcaacggatactggctcatgcgcggctccaataatacggaactgcaaacttccttccccatgccaccccgcctccatgtgcagttctccctttaccataccaatacgttccggattaatcttgccctctggaaggattccgaatccggaaacagcatcaacctggatctctccctggaaaaagcggaactttccaagaccagttccggccagtaccgaacgcttggcagggtgaaaaggaacacggagcggaactggtatgccgacaaaagcgtcaagcgttccgacgttcatttttacgccgatccggaaaagggcaattattacctgtacgtcaacggtgaacaggtagcccggtgggaggaagtcaaagagatggacactatctttgaaaacgagagcggagacgatgaaggggaagatggagaaagcgccgggaaacacgaattcaaaccgggaaacactcttgccctgggaggttatgacagcttgaacatggccgtgttccatttgaatgtatttgactggaatggagccattccccatctggaggaggaactggatatcatttcccgttacgacccgaccgcccccagagacaaggccctgctggtaaacggagacgtgctcaggggagccatttcccttcaggaagaaggctccatccgcatcaagtccgaccattatgacgtcactgttcccaccgccagagtacgcgcactggaccaaaaaggccatgaagagaaggaccttccggaagacagctcagacacccgcgttttcctgacggaccagagcgtcctttccctggccctggaaactatccggaacggggtcatggaagggcgctcctccgcagttggcaaggtcaggattccgctccaatccgtcagaaaggtccagttcaacctgcaaaacccggagctgaggaagcagagggaaacgccgttccggtgcaaataaaggcttctccgccaggccgtcctttccggagaaagccggctgccgggaaagccagaagaagcatccgttaccgctcctccatttcctccgcgcgccgtacggcgcttttcaccgcctgaatccaggcattacggaagccgcattcatccagcgcattcagggcggcaatcgtggcccctccgggggaagtgacctcatcccggagcgccatgggatgcttcccgatccgttccagcatcagggaagccccccgcatggtttccgcagccagccccaaagcggttttcctggacaatcccatggctacccctgcgtccgcaagcgcatccagagccgtaaacatgtaggcagggccgcaaccggaaatggcggaaacggcattcatcccggattccgccaccttgtaaacggagccgcagccggaaagcagcatccgggcagcctcttcatcttcatcttttacgccgtttcccgtactgtaggcgatgacgccggctagcaccatgcacggggtattgggcatggtgcgtataatgcgcgttccgtcgctggcgcaggcttccatatcatccagggaaacggcggcagcgatagaaatcagaaggggaagctccgccccccgttcggaaagagaggaaatgagcggaaggacgccgtgcggcttcacggccagaatcaggacttccacggcgtccgccgcatccgcctccgaggcagcttcatgaactccggggtattcctcctgcagggcctgcacgttttcatgatgatgatcgtacacccaaacttcctccggaaccgctgctccggctttcagcatgccccgcaacagggcgcctcccatttttccaagtccgatgatacctgttttcatggttgatgattttttacagtcaacatataagcgatttatagaaaatggaaatgccaattaaggcccatggctatggacgagaatgcctcatttccgcgtttgttccctccggccctgttatcaacgtctctggctggacatgcggttgggattttgcgtactgggccgcgttgcagaaacagccctcaatatggtcgttgacaaacccggttgcctggaaaaacgcataacagatcgtcagaccgaaaaacctgaatccccgccttttcatgtccctgctcatggcttccgactccggagaaacagcgggaatctgagccagagcgctgaaatggttaacaacgggctgatgattggggaaaaacgacaagacgtaccggtaaaaactgccgaattcttcctgaacggccataaacagtttcgcattattgacagcgctgttgattttcaaacggtttttgacaattccatcaaatcgcatcaaccgttccacatcttctgccgtcatccgcgccactttctccacatcaaagccatggaaggctctccggtatccttcgcgctttcggaggatagtaagccaggataatcccgcctgggcgctctccagcaccagaaattcaaacaggattttgtcatcggaaacgggcctgccccattcttcatcatggtatttcatgtaaagttcatcggttccggcccagccgcaacgcgcattgatgatatccttcatacggttgcgccttagaattcctttttcctgaacagccacgccgccagcgtcatgtgaaagacgaagtaccccagcgtaatcagggccagggttccgaacagggaaaggggaataagacgtccgttcagggcggaatccgtcacggaataaatctggaaattcggaaaaaccagggaaaagagcctgctgcccgccacctcccaccaggaaagtccatccgtgccggatcccacccacagggaaagagcctgcgtctggaacagccccgccagatagatcatgaacgtcagcagcgcgctgataatggtgccgttcgtcacgcaggacatcaacagcgtgagggaggaaagcacgacaaactcgcacatcatcacgcccagccccgtctgcacgttccaggtagctccctgaaggcggatcctgtccaggtacggctgcatttcctccaacgtataacggcctttcagagaggctatctgctccgccaccaccgtatccgtccgcatccacagcaccagcgtcattacggcatccatcagcagcacggcaaccagggtcagggccaacacccccagcaccttccccatcagatagtcgatgcgcggcaccggtttgcaaaggatagtgtatagaatacggtcctccgcatccctgggaataatcagagccgtggccgccacgcagaaaaagaggccgaacacccgcatggcgccgtaggcggagtttttcagcagcacgagttcattgattcccccggtttcaggccccagcaccgcgctcaggcggaaggaactcagagccagcaacgccacggcgaagagcccaagaaagagaaacaccttcatgcgcaccagctgcgtaaaggtggtaccggcgattacggccatgcgcccgggcgaaggtatataaccggaggtaatccatgccatgcggatcatcttgccgtattccggagcaaataaaagagctttttatttcatgtgctgaactccttccgccttgaagaagcgcttctcccgtgttctcatggagcgcgtatgagtttacgatcccagctggaagaactgctcccggaacttttgccttccgatccggcccaggccattaagggaacagaactcatccgcctggtgcgcctgaggctgggggaggaatattcggacgcatccctgcgctaccatttttctttcatggcttccgagccggattcggaaatcgccaaggtggaacgcggccagggctattacaggcgcatgagggaacgggacgggcagcgcgctcccagagggcttttgcccctgtttctcggggaaaacgacccggacgccctgaactgccgcgccaaggcgctggccctggccgtgcgccagtacgataccacgggccgcggcgttttcgtgttcagtaccagtgaaaccggaacttcctgggtaaagccggatctggccgttgtggaatggccggagggggaatgggagggaaacgcgcttgtttttgacaaaagcgcacttcagcgccgccgcatgatcggggcacccatgatgggcatccgcagcgtctgcgtagcccgcatgcccggtggagaagacggcagaagggaatttttcaggactctggccacgtcccgctgggcacagtgcggagaactggtcattgtgggggaactgccggatgattccgaatgcgccgccctccgcgggctggccgccgagttcggcgtaggggtgctttgcctggaaattgcggacgaacgcctgggagaactccccggcgcggaggaaattttcaaagccggagatgaagaatgcgccgccctgctggcggagctcacgcccgtacggctggccgccggaaggctgaagacgctggaggcagatacgggggaaaccctgggcggggaattcggagccctgttcgactggctggccgcctgcctggaacgcggcagcgtggaagaatatgaattccgcgtctcctgttactgaatgcggcggagagattcttgacagaacctgcgtattaaattaaagattttcccggctccaacccgcccttccccctgacatggaacaagaaacactggtttacccgcttgcggacaatactgttctgcaagacaaatatacgatattgagcgtgctgaacgccggcggcttcggcatcacgtacctggctctggacaaccccggttcccggtatgtcgtcatcaaggaatgcatgccggacgcctacgcctgccgggatatggaaaccggcgttgtccatccccggaacgaacagaccgccgtcaatttctcccagagcgtttccaattcccggcaggaggcttccgtcctgtcccagctcaaccatcccggcattgtccaggtgtttgacatgtttgacgccaacggcacctgctattacgtcatggagaatatccagggacagaccctgttcgacctgatgaccaccatgcacgccaccgggcaaaccatggaaccggcccaggccacggatcttctgttccgcctgctggacatcctgcactaccttcactccatgggagtgtaccattgcgacatcaagccgagcaacatcttcatccagccggacggaacgcccaagctcatcgacttcggcgccgtgcgcaccaaaaccctccagcatcaggggctcgtccagatcacgcccggctataccccgccggaattctaccccggacgccggagcgaaataggcccctggtgcgatatgtacgaactgggcgccacgttctacgaattgctcacgggccaggttccccatcctgcggatcagcgttccgtggtgcaccgcaacccgaaagtgaccagttacgcggccctgcggaaaacttatcccatgaacttcctttccggaattgacaaagccctgtcgccggacgaacgcaaccgcttccattccgccaaggcatggaatgactatatcaacgccatggcggcggcaggcaccctgcaggccggcggagtatcgaggaaggctcttccccaggccaggaaaaaatcttccgcaggcacggctttcctcatcatcctgctcatcgcaacggcaatcggctgggtatgctggaagcagggtctgcttaacttctgattccggccgctttccggcggaaacattgaagggtgatgtccgcaaagacacgccccccccaacgcaacaagggctgaacctgacgatccagcccttgccaatacggaattgaacgggagaaacagcctttacaggctttccccgaagtcccggcggtatttggccgccagtttttcaggccagtcgctcttggcgcggagcttgcccatgaagaagcgcaggacgggcggttcctccacaaattccaggccgccaatcaaatcgcggttgtcatagagccacttcatgcgatccgccacgtatttcacctgggataacgtgaagacacggcgcgggaaggccaggcggagcagttccacatccgccagaatgtccttgccgttttcatcgcggacgctggaaagcgtgccgcgttccatgccgcgcacgccggaggcgatgaagaaagccgccgccagagccccggcgggatagtcctcctgcgggatatggggcaggaaacgccctgcgtcaatatgggcgcccagaccgccagcgggggttacgcagggaatgcccatgtccaccatctggccgatgaaatattcaatgaaggaggggctctgggaaatcacggtcaaatccgtggtttcatacaggcctacggccatggcctcaatttcccgcacggagatgccgccataagtcaaaaagccttcaaagaggggaacgagatgctccattttcttggcaatggcccggtcgttcgtgcagatgccgccgccgcgggaggaggaaaccttgcgggcggaaaaatacaccagatccgccagtccgcacatggtcttcaggatgtccgcgcaggacgcatccctgaactcgtcttcacgcatcttgatgaagtaggcgttttccccgatcagggaggcgtccagcaccagcatgatgccgaattcatcgcaaatgccgcggatttcccgcatgttggcaatggagaagggctggccgccaatcaggttggttgaggcttccatgcgcacgaaggggattttgcccgccccgtgacgggcgatgcactcccgcagcttgccgggatccagattgcccttgaagggattggtgctgaccggattgacggcttcatcagccaccagttcctcaatcttgccgccgttcaggtcaatatgggcgtgcgtggtggtgaaatggtagttcatcggaaccacgtccccgggcttcacgaaggtgcgggcaatgatgttttcacaggcgcgcccctggtgggcgggcagaaggtattccttgccgaagacatcccggacagcctgcttcaggcggtcaaagctctgggaaccggcataggcgtcatccgcccggaacatggcggcgatctggttgtcgctcatggcgttgacgccggaatccgtcagcatgtccagatagacatcgttcgtgctgagctggaaggtgttgaacccggcttcccgtgcggcttccaggcggcgttccacggggacaagatgcagcttctgcaccacgcggactttatgcagttccaggggaatttgttccccattgtaaaatttgacaacgttggatggttctgaattcataaaataaaaggtaaacaaaagtgtagcagaatgaatcttttccgcaacataaaaggacaaacggcctttttttgccttccgacggaaaggcaggaatgacgctggaaggaaaaatgtggaactttccggagggagtttctagcgtggctccctatgaaaaaatactggaaattgattcaacagcacctgggcgtggatgcggacggcatccccggccccaagacggcgctggccctgctggacaggctgggcatccgccaaccggaacaatcctggcccagccaggaggaagtgcgctccgggaaatccgtcttcggccgtgcgggtgatgaaagcaacatgaccagcatcaagctgccttatatcatgcggctggcgtgggaaacaaacacgaccgtttccaccatgcgctgccacaagctggtggcggaaccgctcgtccgcatcttccaggctactctggaccattacggcatggagaaaatcagggaactggggctggacctgtacggcggctgcttcaacaaccgctccatcatcggcggaaaggccacatccatgcacgcctggggaatcgccgtggacatggacccggacagaaacggcctgaacatccccgcaccgaaagcggtattgtccggaccggagtacgccgccttctggcgattcgtggaagcggagggggccgtatccctgggacgctcccgcgactacgactggatgcacttccagttcgctactctttgaccggagcggacgcgaacgtcctccagccctcctcccagcggcggcggagggctggccagtcctcaccgttccctccatgccccaggaaagagcgctttttcagctcccggaaactttctccgggaaggtggagaagttccccgcggtcataggcattctgatcacacatgccgttaaaaacgggagtccactgccagcggcgcacgcccagataacttttgaatgtatctaccagttccgtcgtgcagttggcggtgacggtatgataatagcgcgggcgttcatggaggctgttgattttttccgcaaaccccagaaaggcctttttcaggttttccctgccgatgttgatgcggtacaggtacatgtcctctttccggtaattggtgcgcagggcgaacaggtcttcttcgtccgccaggatgtaaatcacgttgaattgcttgtaaaggccagggacacttccctgctccaccccctccggcaggcgcgtttccacggacagggccatatgcttcccatcctcaaaaccgaaggacaacatggtatgggccacgaatcccatcccatcccagtgactcacggcaaaatccagcgtagccagcttgtccaggtcaaagcggcgcgtcacatagcgcgcgtcgaagtcccgctccgtccggtagataaaactgcgcacgtccttcaccacgatttcatttccgttgatttccacggagggcaggcgactccaggacggctgccattccttatcgttcgtcgccggtatgaacaggtagtacgccagcagcagggccggcactccccaggaagcgcgccataatacgggccgttttccgcggagggcgaaggcgcatgccatggccgccacgtacagccacaccagcacggctcccccccatacgttgtaaaaaaccacgcccgccgcccatacggagaaacagaaccacgccgccgtcatcaggatgcgggcggcggccgggcacgcgcggcgcaggaaagtcaaatgcatggaaaatgaaaagcaggccgcgcgctccagcccatgaaacgcgcggcccgttaacggggattacctgaaggaaaggcccttcactttgtccgtcagggctttcagcacgcgctggtgcgctgcatccacttccgcggccgtgagggttttggccggatccctgtacaggaaggtataggcaatggatttgcggtccgccggcagcttttcaccggaggggttcgtgaacacgtcaaagcaggaataactgacaagcagtttttcccgtgcggattccacggccttgacaatgtccgcattgggcgtggagaggggcagttccatggccgcatcgcgggaagaaccggggaactggggcaattccgcagccttcacgggcgcggtcaggatttcctgcattttacggagatccagttccgccacgtacacgggctgacccaggcccagctcccggcaacgcgccagggacaggcgggcgaaatagccgcaggctttcccgtccagctgtacgtccgcccccagggcggcctgttcgcgcggtctggcaggcgtgagcgtaaaacggtggcccggcgccagagccgccatcacggccagcagatcctcaaaggaggcctgctccggcctgggatccgcccaggaacgcgccgtgcggtccccggaaaccaggatgcccagggtatccgtttcaatgtccctgcccttgccgccgcccgtattgcggaagacgcgtccaagttcaaagaagcgcaggccggaaacgccctggttgctgttgcgcacggcggcggcaatcaggccgggcgtatgggcggggcgcagcacggagtgatcctcgctgagcggcagggatacgcggatgaggtcaccgtcctgaagggggcgcagaggcaaagcgtccttcacctgggcgatggtgccgtccgcggattcggaggcgatgagcttgatggtctgggtttcataaaatcccagggccgccagcttgcggcgcagctccatctggaagttataggccgcatccaccggggattccgccacgaaggggccggagaagcgggacggtatgccgtccaggccgaaaacgcgcacgatttcctccagaaggtcgcacgggcgcgtgagatccaggcggtggggggggatcagccagcattccggtgaatccggaacctgcttcaggcccagcgccgtcaggatacgagccccttcctcatgagaaatggaaccgccggaaatctgatccagcgctttccaaggaagttgtacaaagcccagttcattagtcaccgtggcgcccttcccctgcttcagggaagcgaacacggaaacggggccgtccgcccctccgcaggaaggcatggaagcatgagccggattaggaacgggagaaccggccacatacgttggggaggccgttccgcccgccagctgaagaatcagttccacggcgcgcacggaaccgcgcaggacattccaggcggaagtgccgcgttcaaagcggtaggaagagtcggaggacagggccagcctgcgggacgtggcgcggacggaggagggcttgaaccaggcggactccagaatgatatccgtagtggcgtccgtcacgccgctttcctccccacccatcacgccgccgatggcgagcgccttgccggactggtccgcaacaaccagatccgtgcagttaagcgtgtattcctgcccgtccagggccttgatggtttccccttcataagcggtgcgggtgacgatgccgccctgcactttcgccgcgtcaaaggcatggaggggcgttcccagttcatgcaggacgaagttggtaatatccacgatgttgttgatggggcgcaggccgacggctaccaggcattccttcagccattccgggctttcctgcactttcacgccgctgatttttacggcggtgtagtacgggttcagctccggctgatccagccgcacgaagtctccggcgggttccagcgccactccggcgtcgtcaatggaaacgggcctgtacccccggccggagatagcggccagttcatacgccatgccgttgtgggaaagcaaatccggccggttgggcgttacttccacttccaccagggtatccgccttgacaacctgggaaatcggtgtaccgggttccagttcctgagggagaatccagagaccgtgctccttgtcgggaagccccagctcggaggcggaacagagcatgccgcgggactccacgccgcgcagcttgcccaccttgatttcaacgttgccgggcagcaccgctcccggcagggcgcaggggaccttgtcccccaccttgtagttctgcgcgccgcacacaatctggtgcagcgtaccgtcgcccacgtccacctggcagactttcagccggtccgcctggggatgctgttccgcggcagccacgcgggccaccaccacgtatggggaatccacgccctgctggcggatgtcttccacctcaatgccggcaaaagtcagcatgtcagacatttcatccacgctcaggccggacaggtcaatgtactgggaaagccagttaagggaaatcttcataacgggaaaacaggtaaaaattattggaattgggcaaggaagcgcacatcattctcaatcagggcgcggatgtccctgatgccccagcggatcatcgccaggcggtccaggccgatgccgaaggcaaagccggtcagccccgtgtagcgggcctgcgctccgtggtccaggcccagttcgcgatccacggcttcaaaaacattgggatccaccatgccgcagccggcaatctccacccagcggggggcctggccgtccaccttcagcttgacgtcaatttcaaagctgggttccgtgaacgggaagaaatgggggcggaagcgcacctccgttccggaaccgaaaagggcgcgcagaaaatattccagcgttcctttcaggtcgcccacggaaacgtccgtatccacatacaggccttcaagctgattgaaggcggaaaggtgcgtggcgtcaatttcgtcgcggcggtaggcggaaccgggagcgatgacacgcacgggcggcagctgcttttccatggagcggatctgcacggaagacgtgtgcgtacgcagaagcttgccggaatcaaagtaaaatgtatccttctcattgcgggccgggtgatcttccggcgtgttcagcgcgtcaaagcagtggaactcgtcctcaatctccgggccgtccgccagggcaaagcccatgtggcgcagaatgcggacggcttcatccctcacgatggtgagaggatgcagaccgccaaacggcagggagcgggccggaagcgtcaggtccacaccggccacggcggccttgtccgcttgggcctgcacttcctccagcttggcgtccaaagcttccgtaatggccttgcgggcctcgttaagcaactggccgacggcgggcttttcctctctgggaacgtccttcatgcccgtctgggccagggtcagttccccttttttgccgaggatggccacgcgcgcgtcttccacgccgcgcctgtcagacgcctgggcgatgcgtgccagggcgtcccgttggatgcgtacaatctcttccttcataaaatttgacgggcaagagcttacccgtcccccccgccagcgtcaagcccttcgggccgcggggaggtcactcaaaagaaaatggcggaccccggaaaggggggaaaagaacaatgaacctctcttcctagtcactaatccttaaccattaaatctccccagcaaattacacgtatcccggccgggcggacatgcggccggaaaccatgccgagcacgcagaaaaaggtataaaccaggcagaacggcaaaaaggagccgccctgatgcaggaaggaggtaaacagcaggctcaacagggcgcccatggtaaagccgattccctgggacatgccggaaagcctgattgattcggaaggggcccgggcccgttccaccatcagcgccattccacggctgaatacggttcccgtcgccaggccgaacagaatagccatccagagagcccagtccagcgggagatacaggatgccccagcaggaaagggccgccaatgccatggccatcacgatgaggagcccccggccgcccgtagccttttccagcacgtgcgcggaaagcgtggcgggcagctgggcgaacatggccacggaaaggatgaacccggcatcctcatagctcatgccccgctgcctcagaaagatgggaatccaagtataaaagaaataggccgccccaacgcggctcaagtaaaaaacggtaacctgccatgctttgccgctgcgcagcaggttgtgaccggaagccgccggatcactttgaaacacgccggccgggtgcctgagaaaataagcgccccataccagcattcccagcagaatggggataatccagatccccaggccgaaacgccagcctcccagcatgttggaaatgggaacggacaatcctgaagccgcagcgctgcccacgccgatcatggcgctgtaaacccccatcatggcggaagcatggtcaggaaactggtgcttaatcagtccgggaatggccgccccggcaattcccatgcccagccccatcaaaaccatgccgccgtataaccccgctacgccgtcccagctgcgccagaaaattccggccaccgccagaagctggaaccagaaaatgattttccacggcgtcatccagcgtgccacgcgtggagaaatgggagccgccacccccagcacaaagacgggcaacagggcgaacagccctgaattttccagggaaagccccatatccctttcaatcgttcccagcagcggatcgggagaatcaaacccggtacgcagattgaagcacacgattaaaaaggcgacaaacagcagcatctttcccctgatgcctccggaagtccctgccttatccatcccatgttatacatccttgcccccgcccctgttcaaaagtaacagccttccggctgtcagcgatccggaaacacggcatgacggaaagaccatcaggggaaacaatctccctgcggttttccatcccccctgccatgaaaaagcgccgccgtcccggagaacggcggcgcccgaacacgctaacctcttaagctttcatttggcagggcgtttgccgtacaccagcgtccgcctgccgtcccaggaaacggcttcaatccgcgtagaaccttccggatagggaaccgtggtggaggaattatccctggaatccgtccccaccatggtgatgcggaccatttccctgtctttgtatgtttcaaagacgacggcgtttttccacacgtcatgggaaacaatgcgcctgttgccctgctccgtaacgccctggttgtaaacgccgcggacaggcaggcggttcttatatgcttccgcgctgttgacggaaatatagtaaatgacggggctttccggctttttgtacttcctggcgtaggcaatcaggttcttgcagtcggcctccgtgatggtcatgcgggcgcaggtgtagtcgtccaattcctggtcaatgggtttgagcatgcccgttttccggaaaaaatccgtcaggccctgtctggcggcgtcgcaggcgttcttcatgaacgcaagctggagctcgccgtccttcttgcccctggtatccatcttgatggccttataaaagatatccggataaaagtcgggattacccttcccggctaccttgaaatacagctcaagctgccacaggggggccagcttgacaaaatggtcgtgcaccatcggacggttatccccgccggaacgcttgtccggcccgctctggacaagccagttttcccccttcaaaatgccgttattcagataggcgttgaagcgtccgccaatcatgttgccgtccccgccgttgatgcgttcatgctccaggcgcatgctggagggattcagcatgtaattcacgtaagcggagtaaatgttattggtcacttctccggtggagacccatttcatggcggggcgcacctggttgacatggccgaactcatgggcaatcccccaggcgctgccgggaatcctgtccggattgccgacctccttcatggtgccgttatgaaaggcggcccccgtgccgtccgcgtgcatgaacccgttccagatcacacggccgaacatccggtttttgggcagcatcctgtatttgtacaggcccatgatctgctgctccatgccgataatcctgtcgtacagggcaatgagctcctcccccttgtccggacagaattgtttaagttcctccaccggatacaccagatgcacgcggctgcccacgatgtccacaacttccgtgggggagttttccagcattttcttccagtcgctgtttttgctgactcctcccacgaaaactccgttcaccttgccggacagaatggataaatgcaccttgggagccttcttataattgggggtgaaatactcaatgtagccaagccccttgttcttcgccctgatgatgttgaccccctccttcagcggataggagctgtggcctccgtcccgcccgaagttgtggataaccagattcagcttttcacctttgggatcccccatgaccagcaacacgtcctccccctcctcaaaaaagatgccggtgggattttcaaatttgctgtactggctggtacgcaggcgttccgccagatccttgaccggttcatacggttccgccgtaagggcgcgggccttgcggtcaaatttcttctccgccatccgcgtggcgagcccgcgcacaaaggggtccctgattctggcgatgcggtcgcgcgtgacattgggcttcaacgccagcatgtattcattggcgaacacattggaatccaatgctttcaaaccctcctccgtaatcggcgcaccccctgcttcctgggcggaaagcacgccgccgcccagcacgccgcaaagggccaataaaagaaccccctttttcaacaatggtgagaaaatcatatttgttaaataatactgttcagtttccggaattgtttcaaggaaaaacgcccggcccctcccatgcccgggaaaaagcccctttgtgtgacatggaacgctcaggcccagggagaaaaactgtccatcccccttgacgggggccgtataatgacgctcgcaaaacatttttccatatgaatacagaaacacatcaatttcaggcggaagtccggcagctgctggacattgtcatcaacgccctttacagcgaccgtgaaatctttgtccgcgaacttgtctccaacgcttccgacgccctggaaaaactgcgcctgaagcagctgacggactccaatatttaccagccggacaaccccctggaaatcaccgtagccacggataaggaaaacaaaaccatcaccatcgcggataccggcatcgggatgacggaagcggacctggtggaaaacctgggaaccatcgcccactccggcaccaaaaaattcatggaagcccttaagcagaagcaggaaggcggagcggacctgatcggccagttcggcgtgggcttctacagctctttcatggtggcggaccgcgtggaagtgttcacccgctcctatgaaccggaagccgcctccctgcgctggtcttccgacggacgggaaggctacagcatcgaaacgctggcggaaccgctggaccggggcacccgcatcgtcatccgcctgaaagacgaatatgaagaattttcccaggaataccgcgtcaaggaactcctgcgccgctactccaacttcgtggggttccccctcaacttcaacggagaacacatcaacaccgtccaggccatctggtccaagtccaaatccgacgtgaagccggaggaatatgacgagttttaccagttcatctcccatacggatgaaaagcccctgtcctacatgcacttcagcgcggacgcccctattgccctgaatgccctgcttttcatccccaggcgcaatccggaaatgttcggattcggccgcgtggacgccaacgtgtccctgtactgcaagcgcgtgctgattgacgccaagccggaaggcctgctgccggaatggctccgcttcctgaacggcgtggtggacagcgaagacctgcccctgaacatttcccgcgaaatgcttcaggacaattccctggtacgcaaaatcagcgacatcatcaccaggcgcttcatcaggcatctggaaaaactggcgaaggacgataaggaaacctacagggaattctacgcgcaattctcccgctacctgaaagaaggcgtcgtcacctcctggccgaacaaggaatccctgggcaagctgctccgttttgaatccacgtccacggaaccgggggaaacgacctcatttgaggaataccttacccgcatgaaggaagggcagacggccatttacgcgcttaccggcccttcccgctcccatctggaaaacagcccgtacctggaagccttcaaggcccgcggctatgaagtggccttcttcacggaccacggggacgaattcgtgctggactccctgtccagcgtggacggcaagcccgtcacgatgatcgaccgcgccgacgtggaactccccgccctggaagaggaacagaaagacgccctgccccaagaggaagccgcggccctggaagaatggctgaaagggctgtacccggacaaattctccaaagtcaccctgggcaagcgcctggtcagcggagccgccgtagccctgcaaagcggcaatgacatggggccggaaatgagggcgtacatgaaagccatgggtcaggaagtgccggaaagccacccgcagctggaactgaacccctccaaccctctggtgaaaaagctttccgccttgcggacggaaaacccggaactggcgcaaatggtggcggaccagatcgcgaataccgccctgctccgcgccggcatgctggacgatcccgccgtgctggcccagtcctcccaggccctgatggaacagctcctgctgaagtaggggcccggaagaaacagcttccttccccaacgccgctcccagccctccccgccgggggcggctttttcatttctcttcccgccatgaacgcgttacgccacatgccccgccacgttctattcctgaggctggcctatcaagcgggcatgtgcctgctggccctggtcgccgtaacgctgaccgccattgacctgacaacggaagcggcggaatgggaagtcacggcggaccgcaccatctactggatttttgtgctggattatgtgatccgcttctccatcagccgatccaaatggctcttcgttaaggaacacccctgggatttgctggccattattccctttgacgccctgttccgcctgttcagattcgcctcgctgggagaaatcttaaggctcgccagatatctggacctgttttcctatgctatgaggttcaccacgcgcatccggcgtttcttcaacacgaacggattcaagtatatctgcatcgccgccctggtcatcatcctgctgggggccgtaggcatccatctggcggaaggcatgagtctgcccaacggcatctggtggtccttcgtcacggctaccacggtaggctacggggatacctatccggtcaccacttcaggcaaattcctggctgtattcctgatgctcacaggcattggattcgtgggaacgctcaccagcaccatcacttccttctttctgagtccccacggcggagaagcgctgccgtaccgggaggaggaaattgaggccatcaaaaagaaactggacgacctttcctccatgacggatgaagacatagacaccatggcggccctgctgaagacccttcgggacgctccccatccccacgctgaagcaaaggaggaaacatcaccttccggctcttccacaatctgaaaacaggtcatcttcaggagcgtgacaactctgtggagttatgaaaattccctattccctccttcggcgccacaacgccgccgcaagtcccagcagggataaccccgccgctccaggttccgggacctggaaccggcgccatgttctggacgcacagctttgtttctcccgttccgttaaagaaagactgacaaaaatccgtctggaattgcgcggtcaaaggcggacaatcccctgcgccgggagcgtccgtcgcccctcttttttcaacctttccgccattctccaaccatgccagcaaccagccctccccgcgcctgggccgaaatcgaccttggggccattcgccataacctgaatgtcgtcaaacaggcggccaaaggggaatattacatgcccgtcgtgaaggccggcgcctatggccacggtctggaacaggtttgccgcacgctggattcggaaggcatcgctttcttcggggtggccaatgtgggagaagcccggcgcatcagccaggcgggctgccgcacccgcccttacatcctgggccccgcgttcccggaggaacgggaggaaatcgtgctgaacggctggcgctccttcatttccaccatggaggaagccgcgcattacaattccctggcgcggctgtacggaaagacgctgcccatccacctttccgtggatacgggaatgggccgcggcggattcctgccggaccagcttgaagaactgctttcccgcctgggagaactggacagcctgcatctggaaggcctgggcgctcaccttccctgcgcggacgaggaccgggagattacgctcaggcaaatctcccgctttgaacagatggccgcccgcatccgggaaaaactgcctttgaagtactgccacctggccaacagcgccgcctccctggattatgaaattccctccaacaacatgtgccgccccggcctggtgctgtacggtttttcccccattccctccccatgggccgcgcaattgaagccggccatggcccttttttcccgcctgacggtggtgcgcacgctgccggaaggccacggcatttcctacgggggcacctttgtgacggaccaccccaccagggtggcgaccgtaggcataggctatgcggacggctacctgcgttccctggcccacaagggcgcccgcgtcatggtggacggcgtttcctgcccccttctcgggcgcgtgacgatggaccagatcatggtggacgtcagccgggcgccgcacgcggaaccgggcataactgcagagatcatggggccgcatatccccgtgacggaactggcggaaaaggccggcaccatttcctgggagatttttaccggaataggcccccgggtaccccgccactacacccactaaaccaggcaggagggaaaagggccaagccggccgcccatttctgggggcttctttcccgattgacggacagacagaaatatcgtttagttagccagtatgatgaaggtttccaccagaggacgttacgcgctgcgcctgatgattgacctcgcccagcaccgcgacgagggttacatctccctgaaggagatttccgccaggcaggacgttaccgtacgttatctggaacagattatcgccatccttttgaaagcgggattcgtccagagcttccggggaaaggccggcggataccgcctttccaggcatccgcgcgaatatactacggaagatatcctgaaactgacggaaggctccctcctgcccctttcctgcacggcttcccacgagaatccgtgcccgcgggcggccggctgcgccacgctgcctttctggcgcgggctgcaacaagtcattgagaattatttgcgccgcgtaacgctggaagatctggccgaacagcagaaggaaatcggctgcgactacggagcaggcatttaagcagcagccgcgggcctgaacatttccccttcctttctccttccggcccatgtcccgttttttttacccggagcttgacatctgctttccttttcattatttattccctagttttccgataggaatataaaaaccatgagtaagaaccatcgatttgaaacacgccagatccatgtgggtcaggaaagtccggatccggccaccgatgcgcgcgccgtgcctatttacgccaccacttcgtatgtcttcaaagactcggaacaggcggcagcccgttttgccctggcggagccgggcaatatttataaccgcctgatgaaccctaccgcagatgtttttgaaaaacgcatcgcctccctggaaggaggggcagccgcgctggccgtctccaccggggcagccgctgtcacgtatgccatccagaacatcgcccgggccggggaccacatcgtttcttcttccaccgtatatggcgggacgtacaatctctttgccaatacgctggcggacgccggcatagaaaccacttttgtggatgcaagggacgttcagaatttttccagggccgtccggaacaataccaaggccctgtacgtggaaagcctgggcaacccgaactgcgacatcgtggatatggaagcgctggcggaagtggcgcacgcccacggcatcccgctcattgtggacagcacgttcgccacgcccttcctgttccgccccctggaacacggagcggacatcgtggtgcattccgctaccaaattcatcggcggccacggcacggtgatgggcggcgtgattgtggacggcggtaaattcgactggacgcagaacgacaagttccccggcatcagcaagcccaaccccaattaccacggagccgtgttcgctgaggtatgcggcaatctggcctatatcgtcaaaatccgggccaccctgctgcgggatacgggagccaccatcagcccgttcaattccttcctgctgctccaggggctggaaacactctccctgcgggtggaacgccatgtgcagaacgccctgcgcgtagcggactatctggcctcccatccccaggtggagagggtgaaccatccctccctgccggaccatccggaccacgacctttacaagagatactacccgaacgggggcggctccatcttcacctttgaaatcaagggtggcgcggaaaaagctcgcaagttctgcgaaagcctggaactattctccctgctcgcgaacgtggcggacgtcaagtccctggtgattcatccggcctccaccacccattcccagatgacggaggaggaactgaaggcgggaggcattacgccatccaccgtgcggctttccatcgggacggaacatatcgacgatattctggaagatctggaacaaggcttccgcgccattctctaacgatttaacggcagcaacgctcttttcctacaagccatgagaatttataaaaacattacggaactgatcggcggcaccccgttgctggaactgaccaattacgaacgcaggaatggcctgaacgccacactcctggccaagctggaatacctgaaccctgccggcagcgtgaaagaccgcattgcccaggccatgattgatgcggcggaagccgccgggaagctgaagccggattccgtcatcattgagcccaccagcggaaacacgggcatcggcctggcggcggtggccgcttcacgcgggtaccggattatattgaccatgccggagacgatgagcgtggaacgccgcaacctcctgaaagcctacggcgcggaactggtgctgacggacggcgcgctgggcatgaagggagccatcgccaaggcagaggaactggccgcgggactgcccaacagctttatccccggccagttcgccaacccgtccaacccggaagcgcatttccgcaccacaggcccggaaatctggaatgatacagaaggcaaagcggatatttttgtggcgggcgtgggtaccggaggcaccatcacaggcgtgggcaagtaccttaaatcccgtaatccggacatccggatcgtggctgtggagccgttctcctctcccgtgctgacacagggcacggccggcccccacaagattcagggaattggcgcgggcttcgtgccggaaacgctggacacctccgtgtacgacgaagtcatcgccgtcaccaatgaagacgctttctccacagggaaggaactggcgcgcacggacggcgtgctgacgggtatttcctccggagcagctctctgggccgccacacaggtggcgcggcgcccggagaatgaaggaaagaccatcgtcgtcctgctgccggacacgggggaccgctatctttccacccctctgtttacggactgattccttccattccctgccatgaaaaaattcaatctccatctctacctggtcacggatgaagcatccaaatgccgcctcagccttctggaaaccgtacggaaagcggcggacggaggagttaccatcgtgcagtaccgctccaccaatccggatgcgggaacctgttaccgggaagctttgcccatacgggatttcctggcttcccgcggtattcccttcatcgtcaacaaccgcattgacctggctctggcgctggaagcagacggcgtccacatcggccagagggatcttccggttccatccgtcagagccatgatcggcccggataaaatcctgggactgtccgtctccaataaggaacagctccgcgccgtggatgcctccctggtggactacctgggcatgggccccgtctttcccaccatttccaagctgaacgcgcctcccgtgctgggagtggaaggcttcgccgctctggcttcccaatctcccctgcccgttgtcgccatcggcggactggacgcggaacgggcccgtcaagtgcgcgccacgggaaccgcctccggaattgccgttgtctccgccatttgcggagcggagaatccggaagccgccgcacgggctcttgcctgacggacggaccgcaggaaacactggacaatcaagcactttttaacgccatgctttcatcgacagaccttgttcaagccgttaccgccgatttggaaaaaatcagggaaacggccccgctggttctttccctgaccaattccgtcgtccagcccctgacggccaatctcctgctggccataggcgccgtccccgccatgctcaacgacgcggaagaagcggtggacatgctccgcagcggaacaggcgccctactggtcaacctgggcaccgtgacgcgcgaacagggagccgccatgcaaacggcggtgcgggaagccaaccggctgaatatcccctgggtgctggatcctgtggccgtaggggctctttccctgcgcacgcggctggcggggcaattgaaggaacaatccccccgcatcatccgcggaaacgcttctgaaatcatggccctggccggctattcctccgtcacgaaagggccggaaagcaccagctccagcgcagacgccctgcatgcggccagggaactggccctgcacacgggggcggccgtgctcgttacggggcgtacggattattccacggacggccgccaggtaaccgccacggaaaacggccacgccatgatgtcccgggttacgggcgtgggctgttccatgggagccctgtccgccgcctgcgccgccgtctcccccacccccctgcaggcggccgtttccacagccgtactcatgggcattgccggagaaatggcctttgaacaaagcccctcccccggttcctttgccgtatcattgctggacagcctttacgccctttctccggaagacgttgtccgcagagcgcgctttctttccctttgacagtcttctcttccccggaaagcaactccactgccatgcacacggcctgacccggaaatctccggaaggggaagcacatcaccaggagctgcccgggagaggggaacctccggcaccctccccgctagaacaacctgcgccatattttcaggcatcccgcctgcggagcaggaagcggcatgccggggacctgacgaatcccggcacagccatttgcctatgccgaccgccagagcgccggaaccgcaagcggatttagtgttgagaaatacctgcggccttttataatggaggcaacccatttcagcatggcaaactccactaccacgcaaaaactctgcaactggttcattcagcaggcgaacgccaaggggctcatcctgacgcccgtcaaactgaaccatctggtcattctggcggactggtggcatctgcaccggactggcgctttcctgatcaatgaacgggtggaagcctggccttccggtccggtacttccttccatttatcatgaatacaaggatcagccgccctactcttccatagagcatcccagccgccgccagccccctttggaggaggaaacggacattatcccctttctggagcatatctggaacgtctatggcaaatatacggcccagcagctcggacgcatcaacaccgccccgtcctccccatggaagcagtcccagggcaggcatgaacaggcgcaccgccagcaaatcacggaggagcacgtactggcgtactttaaaagcctgaccggataattccggaaaaaacagcctgccgcttacctgtacagcctttttccaatcaaaacatatctttgagtaaaaaaaaacttgcaaaaaacggcctcttccgctttaatgcgcccgcgccgcaaaagcgcccgttacatagccctatagtgtaatcggtaacacagcggattctggttccgtattttggggttcgagtcctcatagggctaccacttctaataaaaaggccgtctctccggaggcggcctttttattttctttctattatcgattccgcgccggacaacaaggagacggcaaaaaatctggaagcaaaagatgattatttgacagaacctgtttcctccccgtttatattggaaatatggcacgtcccttacccattctcggcggcattctgctctccttctcccctccggcagaagcaacagcccaatacagcattatccctgagccgtctagaacggaactcaagcaggaaacagctaaaactttacagcttctttccgaccaggaagttccgaccctgggaacggacgcctaccggctcacagtcaccccgcagggggcgcaccttgcttccggaggaagggaaggcagaatttacggactggcaaccctccgccagctccgggaccagctggcgggacagccggagggcattccctgcggcgtcatcacggacaagccgcgctatccgtggcgcggcctcatggtggatcccgcgcggcatttcatccccgcggccgatctgaaaaaatttgtggatatgatggcctactacaaattcaacaggctgcacctgcatctgacggacaaccagggctggaggctgcccgtgcccggctactccaaattgaaaagcgtcgcatccaggcgggaggaaagcttcggagacggaatcccccacgaagggatgtacaccaaacaggaactgaaggaactggtggcgtactgcgcagcgcgcggcattgaggtcatccctgaaatagacatgccgggccacaaccaggcgcttcatgccgcctacccggaatttttctgcttccccaaaccggacatgaacgtgcggacgacagcgggaaacagcaaggaactggtctgtccccagaagccggaagtctggaaattttatgccgccgtctttaatgaactcaaggatatcttcccgtccggtatcgttcatctgggcggggacgaggcccccacggaactctgggaaaaatgccctctgtgccgggaagcccggaccagggcagccatgaaagacgaacaggaacagatgaaagccttttttgcgaaaacggcagctctgcttgccaaaaacgggcaaacgccgcaattctggtatgaggggaacgccggcatttaccatccgggggaaacggtttacgcatggcggcaaggccaggccctccagtccattgagaagacgaaaaaggcgggattgaacctgattatggcctccagcgaatactgttacctggattttccccagattcaggggcagcgcaactggggatggatgaaaaccaccaccctgcaaaaatgttatgacctggatcccgcttttggaaaaccggagaaagaggcaggccatatccggggcgtgcatgcccccgtatgggcggaacgcctgccggacttgaaccacttgctttaccgcgcctatccccgcgcctgcgccattgcggaagccggctggtcaccgatgggcgtgcgctcctgggaaaacttccggcgcaagctggccgaccaccgtcaattcatcctcaaacgcttcaattatgatatggagcgcactcaggggaatgaaccggccttccgctgggaaaacaacaagtaatttcaccgtttttccttatcacgcatcccttaccatggtagaatcttttccgaaacagttcttcatgatgtttaaactgcccctcatcctggcctgcgccattttttccgcccacatggcatgtgccgccgcaacggacaaatacagcgttatccctgaaccggaaaaaacggagctgcagcacaacagtaccggaaccttgaaacttctttccgaccaggaagttccgaccctgggaacggacgcctaccggctcacagtcaccccgcagggggcgcaccttgcttccggaggaagggaaggcagaatttacgggctggcaaccctccgccagctccgggaccagctggcgggacagccggagggcatcccctgcggcgtcatcacggacaagccgcgctatccgtggcgcggcctcatggtggatcccgcgcggcatttcatccccgcggccgatctgaaaaaatttgtggatatgatggcctactacaaattcaacaagctccagatccacttgacggacgaccaggggtggcgtcttccggtgcccggctaccccaaactcaaaagcatctcctccaaacggaaagaaagcatgcgcaacggaattccccatgaagggatgtacaccaaacaggaactgaaagagctggtggcgtactgcgcagcgcgcggcattgaggtcatccctgaaatagacgtgccggggcacaaccaagccctggcggcagcctacccggaatttttctgcttcccgaacccggatacgaaagtgaagaccgacgaaggcgtcaccctccacctcatctgcccgcacaaaccggaagtctggaaattttatgccgctgttttcaaggaactcaaagatattttcccgtccggcatcgtccatctgggcggggatgaagcacccctggaaaaaacctgggccaaatgccccctcagcatccagtaccgggagcaaaaaggcatgaaggacgtccacgaggaattgaaggaattcatcaaaaaaatgtcctccatgctggctgttcacggcaagcgcatccaactatggtatgaaaaaccgtgggccagggccaacatctacaacaaaggagacaccgtcttcacctggcgcatgggactgacaccgtccaccatcacggagacgaaaaagcaggggctctccctgatcattgctgccggggaacactgctacctggactatccgcaacttccagggcaaagcaaccggggatggatgcccatcaccacgctggagcaaagctacaggctggaccccgcctacggcagaccagaaaaggaaacaaaccatatcaccggcgttcagggcaccgtgtggggagaacatctccctaccctgaaccacattctctaccgcgcctatccgcgtgcctgcgccattgcggaagccggctggtcaccaatgagcgtgcgctcctgggaaaacttccggcgcagactggccgaccaccgtcaattcatcctcaaacgcttcaattatgatatggagcgcaccaaagaaaacgaaccgcctttcaaataatccgcactctcttttcccatgagcaacatcaaatttgcacgtccgcaccgcccttccgtagaagaactggcccagggagtactggccggaaaccgcgccctgctgggaagggccattacactgatagaaagcaatgccgtccgggaccaggaatcttcccgcgccctcatctccaggctccttccccattcgggcaatgccgtccgcatcggcattacgggcgttccgggcgccgggaaatcctctttcattgaagccttcggcacttacctatgcaaaaaagggttcaaggtggctgtgctggctattgacccgtcttcttcagtctcccgaggttccattatgggagacaaaacacgcatggaggaactctccggagaggaaaacgccttcatccgcccttccccctccggcggctctttgggcggcgtagcccggaaaacgcgtgaaaccatgattgcatgcgaagccgcgggctttgacattattctcattgaaaccgtgggggtcggccagtcggaaactacggtacgctccatggtggacattttcatgctcctgctcatcaccggagccggggacgatctccagggcatcaagcggggcatcatggaactggcggatatcctggtagttaccaaggatgacggcgacaaccgccagcgcgccgcagcccactgccaggaactgaaaatggtactccactacctgcaaagccccactcccggctggacgccctccgtcctcacctgttcctccctggagggacgcggcctggacaccattgaagagacgctcttccgcttccgggacagcatgaaggaatccggattctggtacagccgccgccggagccagtccctttcatgggtccagtccctggtgcatgaagccctgctcaccgcctttgaacagcaccccgccgtagcgtcccgcatgcccattctggaaaacatggtggcgggggacaaaatgcaccccgtttccgccgcacatgacctgctgagccacttcacttatcccgcgcccggacattaaagaaatcttccaggaccctggcgtaaactttctttttaaactccggcagccactccagcttaaattcggctggggctatccacttgtaatcgcaaaactcccggtcatccaggacgggttccggagcatccgcatgcagccggcacaggaaatactcctgcgcctgcccaacaaaaggctgccgccgcttttcacgaacatactccagcacctccggcggataatcgtaacgataccccttccgggattccacaatatcatactgggacggcaaaaaccccacttcctccccaatctcgcgccgcacggcttccaaagccgtttcccccgggtcaattccgccctggggaaactgccaggcccctttctgcccggaacgctcgcaaatcaacaatttcccgtcctgccggaccatcatccccgcaacattcggacgatacaatctttccatgccctgttcattaacatacccttttccgcatttccagccatgttctttccataaacccgttaaaaacgggcaaaaaaatccttttacagattttcccccctacttcaaggcactccgaatatcaaccgccttccaccagaagaataagcggtataaaaaaacgaaaaacttcccgtttgcggcgggaattccggccaatcagctaaaaactttagtaatcagatattaacatactgccatttttcgaacattgttctttattggcaagtctattgttcctgcaaagtaaaatatgggaaccggccttccttttacttttcacgcgttccgttaatgaaactccgatcatgaaaacaaaaatgaactatttgacagccacgcttctggcaatatttgcatggggcggtacaggcgtcggtatggcaaaacaatccaaaaaggcgctaaggcatcccgttgaagacaacaaaaaatctcccggagtttacgatgcgaatcaaaatgaccgtcaaggcactcaagatgcggaacaaggccccggggacaaaccgggtacgtggagcatttcccgtcccaatgccaaaaacgcgctgtctgaagtcacaaaaggaatttaccagattcacggcggaggttttccgaacataactattattgaaggacgggaaggcatcatgattattgcccctttcgtcccgaaaggaaccatggccgagagtcttgacctctattaccggaaggcgggaaaacggccgatcaaggctgttgtagatgcacatccacataccaactattttgccagtaccaaaagaacggcatccgggctggacatagacggcatagaaatggaattcatggcggttcccggaatgggggcctcttctgccgcactgatgtattttccccaattcaaggcgcttttttatggagaggacacggcaagtgccatacatgatatctgcactctgggagtatccagaataagggacgcaaaaaacaggtggaaagcccttgatcaagccattcagcgttatgaagacaaaatagagattttattctcacaacaccattggcccagaataggaaaagacaatatcaaacggttcctggccagggaatgccgcaactgtaaatacatgcatgaccggatattgaacctggttagcaaagggtattcccccgcagaaattgaggaaataatcaatccgattccggaaagcggcagaatcaggaatagccctccggaaatcaccgggcaaaaggactatcgtcaagacgccgggacattaaggaacgttatgtctgcccatctaaaaagaggaaacataaggaatctggtaagaaatatgttgaaacaattcggttatcaaacagaatccgtattccggaacgatgaacttctcgtcaatgccggagaaccgggaatcgggctgcttaaaaactcccgcgaactcacgttgacggacactttatatgccctgactccggaactgctgttcgactatttgggcgtcagcctgaatagtgagaaatccaaagggaaaaaactggctttcaactggattgcccaaaacggaagatcatacggcttctggattgaaaacgaagtgctgatgtaccgcgaaggaaaactggtcaaacatcccgacgcagtcatcaccggagacaggctccacttcgccctggtcgccatgcgggcaatgcccttaaagacagctctggacaaaggcatgattaaaattgaaggcaatacggataaattcagggaattgctcggatgcatggataagttccatggaaatttccatgccataacaccctgattccattacctttttacgtacgtttcaggtttttcatccggaaacaggagtagtggcattttctatcaatatcatgaactgtgccagtaaatattattcaaacagtcatgtattccggcgcaagggagcaactgaaaaaagggatgacatttatccatgaacagacatgttctcccccgcaaacattcaacgatttttccttcccatacagtaagagctgatattaaatagaaagcatgaaacgattctgccttcctgttttagctctatttgtttgtgcagccgcaccactttccgcccagtccaaaaaaggagccgccgtcccgtccacggatgactacaaccagagccagttctggataggcaattttccggaggggcagtatgtggtgcatctcagccggattgtagcggtggcgcagcacaggtatattctggacaatgcctgcatggtgtatgaagtaacgctgattaccctggggaatacgcccaccaagttttattatctggaaacgctgggtcaaaattccggtatcaacgccatcaagaatgtgactgaccgtgcgaaggagcttggggccggcgccgtcaaccgggcaacgggaggcagcattgacccggatacaaccgtcgcaaaagcttacccgaatacgaataccgtggaattccgtgtagctaccctggagcagctcaacaaaatgtatgcttcccttctcaaggcatggcaggacgggaaagggaggacgttcaggccctgacggcttgaatcagtaattagagaacagcgccgggcggtcagatttcaatccgcgggctgcaagtacggtttttacgctcatctctcattactgctaaatgtatttcctctccatcatgtggaccttcaaagggcccgcagaaaagaggtgggtgaggccgatcgccagagcgtcggcggcatcggattccggcgtttcccggagttccaaaagagcccgcaccatgaaggcgacctgcgttttttgagcggccccgcgccctacgacggagagcttcacgcttttgggggaatattccataatacgcagcccggcttccgccgcggcaatgaccacggccgccttggccgcacccatcgtgatggccgtctgatgagactggacatagatgatgcgctccaccgccatttcatccgggttccatttgtcaatgagattgcccaaatgctgcttgatggcaagcaggcagccggactgggacacgctccggggaatggatagcgttccatagtccagggcgcgcgcgcgccggtaatccccctccaccacggcataacccgtgttgcggatggccgggtctatggcaagaatgcgcatgggatgatcttcattccatcagagagaaacatcatgtttcccccccctccttagcgtctgcggcgcttgggacctgcgggtttgggcttgcggacggatttgacgggcttgtcttccaacagggcggtgtacgtgtagttgaacccgtccagttttttgcgttcaatgggtttcccaatgaaattttccacagccgcagcaaaatccagctcatccgccgtcatgatcgtgaacgcatccccggaagcttccgcgcggccggtacggccgatgcggtgcacatagtcttccgcgttttccggaacgcggtagttgatgacgtgggtcacaccgctgatgtcaatgccgcgcgccgccacatccgtagccaccagaatatcgtattttccgctcttgaatcccttaagcgcctccatgcgttccttctggggaatgtcggagtgcatgacggccacctccccgcggtagccatgatgcttgagcatgccgcataccgcgtccgcctccttgcgggtgcgggtgaaaatcatgacagaacggaagtccgtccccttgagcagggccaacagcagttcatcccgctgatccagagctaccggataaaaggcatggctgatggtggcggccacttcacgccgggcgatggtaacttccgcagggtccgtcaggcaccatttggcaaatcccgcgatgaccggaggcatggtggcggagaagaagagggtttgccttccttcccacggacagaggttgacgattttacggacaatgggcaggaaccccatatccagcattcgatccacttcatccagaaccagggccttgacttctccgaagcgcatggtgcagcggtagaagtggtccaccagccggccgggagtggccacaacgatgtccgccccttttttcaggtcttccgtctgctttccgtaccccacgccgccatacagcaacgctactttcaacccggtgaattcaccgtattcggcaaaggattccgccacctggtcggccagttccctggtgggttccagcaccagtatctgaggtttgccgatgggctgaatccttgtcagcagcgggagggcgaaagcagcggttttccccgtccccgtctgggaggccccaatgaggtccctgccttccagaatgatgggaatggcctgctcctgaatgggggtgggatgttcataaccgcatttctccaccgccttcaagacgggttccgataaacctaattctgaaaataacattgatcttgtatgcttgctaaagagtagaacacgattccgtacagcggcgcgggaatcgcggtcaggagatgaacggattggtcagcagttcgtttttcacgttggtatatggaccatggcccgggaaaatcatggtcgtggcgggctggttgagcactttcttttcaatgccctgtttcagcaggcgcaggtttcctcccgggagatccgtccgcccgatggagccggcaaaaatgacgtcacctgtgaacatgattccttcatccggcaaatcgtaaacaatgctgtccggagaatggccgggcacctggtggagatgccacaacaggccgccccaattcgccgtgtgaatgtccggagtaagtatttcatccaccacaaacggctgaacattgaggggaagcccccaggcgtcgcgggccattttttccagcgtcaggctttcattgtaaggttgcccggcatgaatgcggcagtcgaaaatctggcgcatgcggcaggcgtcctccacatggtcaaagtgctggtgggtgatgagaagatccgtgatgatgatatcgggctttttggaatagatccagtccgcgaagccggacggagcgtccaccgccacgtaagcgttatccctcgtcttaaagaggtaaccattacaggaagcaactccacccgtataaacgcgaatccgatccatgggcagggattgtagtgagatcgcccggaatatccagtataaagacggttcccttaaatagctttctgtcatcttcccctggaaaagccccttatatcagtctccagggaatggtgcatccggcatccatcggcaccactttctgtccatgcccttcataagcgtccggcaccagcatttcacgccgctgcagacggaccgtcctggcaggcggattcaacccgtacaaagcgcaggcatgaccggaaacaaaaccctgcaaccgatccagggctctgtgttcgtcaaacagggccgccagacgaggaagagcgatgggggcggtaaatacgccggcggcgcatccgcacgcttccttggcatggatgggatggggggcggagtcactgccgaacatgaggcggggatgcccggaaagggcagcctgcaacagggcttcccggtcttccggccttttggcgatcggcttgcagaacagatgcggcctcagcatgccaccggccacatcgtccaaagtaatgagaagatgctggagggttaccgtggcggccaggttttcaaattcgtccagcagctgcacggcggcggccgtggtaatatgttccatgcagatagtcagccgggggaagcgcgtggccaaatcacggtaaacatccaggaattcggcctcccgatccatcacgaagccgtggctttcgccatgcaccagcaaaggaatatccatttcctgcatgatggacagggtagcttccgcatctttcatggccttcacgccgccttcgctgttcgtggtggcccctgccgggtacagcttgatgccgaacaccagttccttgagccgggacaattccttttctgaataggagcggaaaaatgccgtcatgtacggctggaatacatcgtctccgcaagcgtccagcacccgctgccggtaagcctgcaccgcacccgcatcagccaccggaggcaccaggttgggcatgatgaccgccccggcaaaagaggcggaacttaacggagcgaccagcttcatcatatcgccgtccctcaggtgaagatgcatgtccaacggggagtgcagttccagaatcatgccgacatcatgagggaagattgcgcccaaatcaagcacgctcccctgccctgcaggaaagcaattctccgacggtaagggaaaacgggcattttcccgcaaaccggaagggatgcggtacgctttgctgctgttgctacaaagcaaaatcgccgggaaacgaatcgtaaaagcaaattctgtcccaatgcctcagaaaaacgctgttctcccggacggctttcttgaaacagcagacggaatgcaggaacagtaaaagtccgaatgcaaaaaagccgcccggaggcggctgtttttcctgaacaaggtggcgaagcggacggggctcgaacccgcgacctccagcgtgacaggctggcgctctaaccgaactgagctaccgctccataaccttggatgccgtccctgccttgcggcggggacgtggaggcttatacacgcctttataccccggtgacaagaaaaaaagactttttttgcaacttctgcaaccgtcggcggtttgtacggtgaagaaaccgtaacttttcagttacccgatttatttcaatacagcaataacttctcaactttatttgttttagtttgacaacaattaaccggttttgacataacacccccatgcttcagactgccgcggatatcacagcctccgttcacaaattcgagacgatccttcaccagttcaaaagggataacctgaatgaggtggaccagagccattaccagaaaatcatggggctttccgtccggcagatgaacgccctgggtgccctgaaccacctgatgaccaaccgccaggaaggcattcccctgaaagagcttgcccattatctccgcatgagcattccctccacctccctgctggtggacagcatggtgaagaaaggcctgttcgaccgcaaggagaatccccgcgacaggcgttccctgtgcatccgcctttccgatgaaggcgaatccaggttccagatgcttttcaacggcatgaaggaaaaactggataccctgttcagcactctgtcgcaagaggacaaggagaatttctgccgtattgtggataccctttacaaccacgtttacagtaaataataccatatgaaaaaacacacgcatcatcggaaggcgcccctccgcctgctggccggttccggcctgcttttttccctgtttgttccgggttattcccaaggaactccgggaggggctgcagccaaacccagtaccgtactcgtccagaaagccgccgctattgacagcgcggtgaacaagaagtacatcggccaggtggaagccattgaccgggtgactgtgcagccccgcgtctccggcaacatcgtagccacccgtttccgggaaggaaaggtcgtgaagaagggggatctcctgttcgaaattgaggatacgcgctacagggcggctgtggaggaagcggtagccaaaaaggcccagcttgaagccaaactgctttacgcaaaaaatagttttgaacgctataacaggttgctggcctccaaatccgtctccatggacacggtggaaaacgccaagagcaccatgcatgccctggaagcggaaatccagtccgcaaacgccgccattacggtagcgaaggacgatcttaactataccaggctcacggctcccatcacgggccgcacaggccgcgtcactttttccacgggcaattacatcacccccacctccggttccctggtgaccattacaggcatcgatgaagtgtacgtgaagttccctatcagcgaacgcgatttcctttccctgttcggcacccaggaaaatatgaagaaagacgcccttgtgtccgtcaacctcgccaacggcaaggcatacgaccagccgggcaggattttcatgacggacaataccgtccagacgaccacggacaccctgaatgtctgggcaaaattccccaatccggaagacgtgctgacgcccggcggcgtagtcacggttaatctttccaagaaaaacgtggaccgcttcccggctgccaacatttcctccgtgatgcacgatgcctacaagagctacgtttacatcgtcaacgaccagggcgtcgtggaacgccgggacgttacgctgggcaacacagtcaataatgaacagtgtttcagttccggcgtcaaggaaggggaagtcgtcatcatcgacggcatgcacaaggtgcgtcccggcgccaaggtgaatccggtatattccgttcaaaactgagctacccatgattgcggacctgtttatcaaacgccccaaattcgccatcgtcatcgccatcctgatgatgctggctggcggcatctgcctgaaccagctccccattgcggagtatccggaaatcgcgcccaccagcatcaacgtgcaggccacctatacgggtgccagcgcccaggtggtgatggaaacgttggcctcccccattgaggaagaactcaacgggttggaaaacctgctctatttttcctccaagtcggataacaccggcgggtattccctgtccctgacgttcaagagcggcacgaattcggacatcaacatggtgaacgttcagaacgccttgaaacgggtggaatacaaacttcccaaggaggtgacggaccagggcatcaagatcaagaaacgctcctctgacatcctgggattcttcgctttccggtctaccagcatgagttccctggagctgaacaacttcgtcaagaccagggtgaaggatgaggttgcccgcgtgccgggcatttccgccgtcaacctgatgccggaaaaaaattacagcatgcgcatctggctggacgccctgcgcatgtccgccctgaatatcacgccggatgacgtttccaatgccatcaaggcgcagaacgttcaggccgcggccggctccatcggctcggaaggggaaaacaacttcatccaatacaaggtgaacgtcaccggacgactgcagaccgtggaggaattcagcaagattatcgtccgcacgggccaggatggccacgttacccggctggacgacattgcccgcattgagctgggcgcggaaacctacacgggcagcagccgcaacaacggggaagactccgtgaacatggctgtgtaccgcctggatgacgccaatgccctggaagccatgaacggcgtgaaagacacgctggagaagctggaaaaacgttttccggaaggtgtgagctacgtcgtgagctacgaccccacgcaatacatttccgccaccatggcggaaatcgtggaaacgcttgtcatcgccctgattctggtggtgggcatcacgtacctgttcctgcaggactggcgtgccacgctcattccggcgctcgccattcccgtctccctgataggcaccttcgccatcctgctgcccctgggcttttccatcaatgtgctgaccatgtttggccttattctggtaatcgggtccctggtggacgacggcatcatcgtagtggaaaatacgatgcgcattctggagacggaggatctctcgccggaagaagccaccaagaagagcatgcaccagattacaggcgccatcatcgccaccacgctggtgacggtcgccatttacgtgcccatcgccttcttcggcggcatggtagggaacatttacatgcaattctccgtaaccatgtgcgtggccctctgcctttccgccatcaattccctgacgctcagccccgcgctgtgcgttctgctgctgaaaaggaagcaaaagaaacagagcaggttcagcctcttccgccccttcaatgtctctctggaatgggcgcgcaaaagctatatcaaatgcgccggcatcatggtgcgccgcgcgtggcttacgctgattctgctggccgctgtcctggtcggcaactggaaactgtttgagaccgtacccaaatccttccttcctccggaagacaagggcaccgttttctgtgatatccagctggcccctggcgccacgctgggccgtacggaacaggccatgcgcagtgcggaacagaagctgatgagcatccccggcgtgcgccaggtttcctccacttccggattcagcttcatgggcggcaacggggaaaacctgggcatgtgcattgcccagcttgacccctgggacaaacgcaagacgccggagctctccctggattccatcatgcagaaagcttccatcctgtgtgatgaaattccggcggccaaggccaccgtgttcagcccgcccgccatcatggggctgggcctgacgggcggcgtctccttcatgctccaggccagcggggaggaaactcctaaagacctagaacgagtgaccaacgacctgctggacaaaatcaacaaactgccgggaaccatgtacgcccgcagcgcgtatgaggcgaacaccccccagcttttcctgaacatcgaccgtgaaaaggcgcagagcatgcacgtgcccgtcagccgcatcttcacgacgcttcagagcaagctggcctccatgtacatcaatgatttcaacctgatcggctacacgttcaaggtgaaaatgcagtccgcggcagaggaccgcaccaccatcaatgacatcatgaacacctacattcagaacgatcagggccagatggtgcctctcagctccgtagccaccctgtcttacatggtggggccgcggcaaatatcccgtttcaaccagctcatgtccgcagaagtgaccgcccaggcaaaacccggcgtcagcagcggcgagctgatgaaccagattgaggctattccgctgccggaaaattactccatcacctggacggatatgagctatcaggaacggcagaacgatgggaaaatcgtcctgctgatgggtatggccctcctcttcggctacctgttcctggtggcgcaatatgaaagctggacggtgcccatttccgtcattgtctccgtctccgtcgccctgttgggcgctttgctcggcctgattatctgcaatacgcccctgagcatttacgctcagctcggcctggtgatgctggtgggcctggccgggaaaaacgctattctgatggtggagttctccaagatggagcgggagcgcggcgttcccatccaggaagccgccctggaaggggcccggcagcgcttccgcgccgtgatgatgacggccatttccttcatcatcggggtattccccatggtcatcgcctccggagcgggcgcggcaagccgcaaagccattggcatctccaccttctacggcatgattctcgcaacagtggtgggcattctgttcattccggccctgtacgccatgttccagcgttaccgcgaatgggtgaaaggcctgtttgccagaaaggcggaataaatgtaaagggaaactgctccatgaaggacggggcggccttggccgccccgtctttttcttttttatgcttcagcgcctcccgcggagttacggacaagagcggctaattgacctgctcgtacaaatacaggtcaaaatcttcaaaatgttccttcaggacgacacgctccagccggttctcaaatggaggaagaaaagtatccgccggatattccccctttactttggaaacccacatgcgggacatggccggcatcatcagggaaaaaatctccgcccccccgatcaccatgatttccggctccatcaattccagacattccaactcccctgcggaatgaaccacctgaacgccttccgccgtccacgccgggtcacgggtcagcacgatgttctgcctgccgggaagaggcctgcctatgctctcatacgttttccggcccatcagcacggggtgccccgtcgtaatgcgcttgaacgtcttgaggtcgtccggcaaatgccaagggagcgccccccggtaaccaatgccgcggtcgggagccatggcgaccactcctgtataagtaacgggttgtgacatgatggattaagggatgaatgttctaaacggagatgggagccttgatgtgcggcaggggatcataccccacgagctcaaaatcctcataatggaatccgtcaatggtttttacctccggattgagcttcatgaccgggagaggacggggcgtgcgggagagttgttccctcgcctgatccagatggttccggtacaggtgcagatccccgaacgtatggatgaattcccgggcttcatacccgcatacctgggcggtcataagcaacagcagcgcataggaagcaatgttgaagggaacccccagaaaaagatccgcgctgcgctggtaaagctggagggaaaggccgtgcttttcttctcccggctgggcgggaatcacgcaaaactggaacagggaatggcacggagggagggccatgtcatccaccagggccacattccacgcactgacgatgtgcctccgagaccatggattgtgtttcagaccgtcaaccagtctggcaatctggtcaatgggtttgccgtcgtttcccggccagcagcgccactgcgcgccgtacacgggccccagatctccgttttcgtcggcccattcatcccagatgctgacgccgttgtctttcaaaaacttgatattggtctctcctttcaggaaccagagcagctcataaatgatggagcgtaaatgaagcttcttggtcgtcaggcacggaaaaccgtcgcgcaaatcatacctgctctgccgcccgaacacgccgatggtgcccgttccggtacggtcctcccgccccgccccattggtcaaaacatcctccaaaagtgccaaatactgcttcattcccttaaattacgcttttctaatccctggacccgtgataatacgagcatgcgccaccttagtatcatctcctgctccaaaagccagccttttcacttctccccgccgttttcatcccccgcatcttttccggttttccgttccatgatcattcctgaagagccatatttgggatttgccgccttttgccacattgcaggcgccttctgcctgattccggccctgctccatacgcgcacgcctcagggaacaatcgcgtggctcatttccctgctggcatttccatatattgccgtccccttttacctgatcctgggacgccggagattcagcggatatgtggaaacgcgccgccgccagaccgaccccgaatccgcatggggggaactgacggataaaattacaaactgcatggttccgtatgccgtacagtcatccgacacggcgggaaaaatcatgcgcacgctttccaatatcgtgcggctgcccgtctgccgcggcaattcctgccgcctgcttattgacgcggccaatgctttcccgcgcatctacgacgccatcaagaacgcggagcattacatcctgattgaattcttcatcatcaaaaacgactccgtggggcagaacctgaaggagctgctgattgaacgggccagggccggcatccgcatttacatgctgtatgatgaaataggctcccacaagctcccccccggttacatttccgtcctgcggaaagcaggagtgaacattgaacctttcaacgggaagcgccatttcctgagcaacatcctgcggctgaacttccgcaaccaccggaaactggtggtggtggacggctccaccgccttcatcggaggcatgaatataggcagggaatacctgggcaagggcgctctgggctactggcgcgacacgtttgttcagcttgaagggccttccgtccagcaaacgcaaatcagctttctggaagactggaactgggccatgctgaaatgcggcccctcctcccttccccgcctccgctgggaaatcacgccccagccggaagatgaaaccctgctcatcctgccctccggtcccgcagacgtcattcccgcctggaaaaccgcgctcatcgctctggcaaacagcgccacccgccggctctggatcgccacgccctacttcgtcccggacgagggggtcatggccgccctgcaggcggcggctctgcggaatgtggacgtgcgcatcctgcgcccggagcgggcagaccatattctggtgaaactgtcttcctttaccttccttcgggacctggacacatacggcatccagctctgggcctatcaaaaggggttcctgcatcagaaagtggttctgatggacgatgacatagccaccgtgggaaccgccaatctggacaaccgttccctggccctgaactttgaaataaccgccgttatccattccccctccgcctgcgcggaggtaaaagccatgctggagcgggatttttcctcctccaagagggaatccctggcggattacaacaacaaatccctgggcttcaaaatgctctgcaacctggcgcgactgacggcccccgtccagtagttcttccggcgaatccgctgttgtatgcttgacctgcaagggaggctgtgagaaaatcaccctccagaagccacctcttcaatttttaacaacagttaactaaataatgaatcctgttacattcaactgcaccgttctgcgcgacgggcatcaatccctggcggcaacacgcatgaagacggcagacatgctgcccatcgcccccattctggactccatgggcttcagcgccctggaaacctggggcggcgccaccatcgacgccgggctgcgcttcttgaaagaatggcctttcgaccggctggacgccctgaaaaaagcggcccccaagacgccgcacatgatgctgctgcgcggccagaatatcgtgggctacaccaactatgcggacgacgttgtggaagcctttgtcgccatgagcgccaagcacggcatgaacatcttccgcattttcgactgcgtgaacgacccgcgcaacatggaaacctccatccgcgccgccaagaaagccggagcgcaggcccacggcaccatctgctacacgacttctcccgtgcacaccacgcagacttttgtggacatggggcgggaactcgcggatatgggagcggacgccatcgtcatcaaggatatggccggcctcattcctccgtatgtcacccaggaactcgtcagcgccctgaaaaaggacctgaacatccccgtctggatccacacgcatgacaccgccggcctcggcgcatccacttacctcagcgccattgatgccggagtggacgcgtgcgatgtctccatctcccccttcgccaacggcacgggccagccggactgcctgcgcatgcttgccctgctgaacggcaatccccgcaagccggattacgacgcggacaagctcattgaaatctccgaaatgctcaaacccgtctatgaaagtctgggcaaattcgcctcccaccgcaacgaagtggtggactctgacacgctccgctaccaggtgcccggcggcatgctttccaacttccgcacccagctcaaggaacagggcatggaagacaaatttgaggaagtattcgcggaaatcccggtagtccgcaaggccctgggctggattccgctggtgacccccacctcccagatcgtaggcgtgcaggcgatgctgaacgtcaagttcggccgctggaagaacatcaccccccaggcggcggacattgccctgggctactacggccgcacctcggctcccgtgcacccggaagtgcagaaactctgtgcggaaaagatgggcaaggaaccaatcacctgccgcccggcggacctgatcaagcccggcatggaagacctgcgcaggaaacttgcggaaaaggggctccccacggacgacgaacactgcgtcatctacgccatgttcccgcagcaggtggaagacttctacaaaaagccggaacctaaggaagaagcccccgtgcaggtgaacaccgctcccgccgcaacggctccggcggccgcgccgtccatgaccgtcattgacaacggaatcaccgcccgggtgagcggcccctccggttcccgtgacctgaccatcatcatcaacggccagtcccactccgtgaaagtggaacgcatcggctaaaatctccgaagcatctgctcaaaccgtttgcgggcggttccctccatgaaagggaccgcccgctttgcatgaacgctcctgcttcttattcaaccactctgttttcccacagatagggggacttacgccgccaaccagaaagcacgggcatcctgccttctgatttcatccatattcagatatctggttttcaataaatgggcgttttggtgccccatctcccattgcaagccggcataatcccggaatcccagcgcgtggtaactggcaaaagtgtgccttaacacatcctgcacccatggccggctgttattccagccggcacgggcgcgcaccagccgccacttgcgttcccatcctgccgggcacaacggttcttccccggaatgatgccggaaagcccgcaaataccgcaacgccgccggccgaagggtcacccgccgcgcccctcccgtcttggaatgccgcgccggaatgagcgccgctttttcttccagcctgatatgccggaattgaagccttctgacctcctgcggacgcactccggcatacagcatcagcacggctgccggcagacactcgccgccgcacacctcccgcgccgccgtcatcagcttccggcactcctccggcgtcagcacaggcacccttctttccttcaccagcgggcacggcgtctccgctgccgggttcttccccgcccatcctctgcggcaggcaaaagcgcatattccgtgcagaatgacgcgcgccttgcgccgtccgctggccgtcgggaatatattcaggatgcgctggcaatcctcccgcctcagtccccgcatcatcttatgcctcaattccggccatgacttcaccatccgcgccgtaacgcaccggatttcttccagcgtgcgtcgccgccgatgcgcccgggctttcagggactccgccacgcaaacggaaaaactgaccgtctttttcatcgctttccattccttaatccccagctccacgcattgcagccgcccggccatcccggccgacactccccggagcaagcgcgccatgaccatcatttccgcggcctgcacgcgttttttacgcatccagcaaatgagcagggcctcttcttccgtcaattcctgttgagtcatgaagcaaagataagcaaacggattcctaatcagcatcaagtctaaaacggaaagaactgaaaaataataaggaaatacgtgcataaatgggaatttgatactttcacccgcagatatggaaattttattttccctcattttatcactgtaaaaacacttaaaaaacatggataggactcttgctgattaggaatcagcctattttccccaagtgggttccttatcgtcagagttatctcaaattaaatcccgtaaacgggtagcggaacacggagaagtattcacccctgactggctggtgaatgacatgctcaacctggtggcgcatgaagcggaacgcattgacagccgctttctggaaccggcatgcggagaaggagcctttctggcccctatcctgttgaggaagctggcaaccgtccgccggcaatacggcagttccccggcggattatgagttccgcgccgtgctggctctcatgtctatctatggggtggaattgctggcggataacgtccgctcctgccgggaacgcctgctgaccctgtggctgacggaatatgaacggcgtttaaaacgtccgccctccgcggaatgccagaaaaccgtccgctttatcctggaacgcaatattcttaacggcaacgccctgagcatgaaaaaagtagatgcttccgcccaggatactcaggagcctatcctcttttccgaatggtccgccgtgggcggaaccctcatcaaacgccgggatttccaccaggatgaactcctgcgtgatcaaagcgcccggacttccctggaacaggcggaaggggaactttccctgcaatacgttcccaaatctccgacgcgggaattccccccatggattaccgcaaactgccggaagcggaatcatgaacaataacatccataaccctgacgtattgagctgtctggccaatctttccagtgacgaggtgttcacgccgccggagattgccaacgccatgctggatctgctcccgcaggagcttttttccgacccttccgttacctttctggacccctgctgcaagagcggcgtctttctgagggaaattgccaaaaggctcaacaaggggttggaagctcacctcccaaaccgggaggagcgcctggaacacattttcagaaatcagctcttcggcatcgccattacggagctgacgtcccttctcgcccgccgcggagtgtattgttccaaataccccaatgggccttactccgtcgttcgttttgacaatgccgagggcaacatccgctacaaacacatcacacacacctggaggggcggcaaatgcgtcttttgcggcgcctctcaagccgcctatggagaacaggcacgacaagagggactggaaagccacgcttacgaattcatccacgccaacaatccgaataacctgtttcctatgaactttgatgtcatcatcggcaatcccccgtatcaacttgatgatggaggcaacggagcaagtgctatccccatttacaacttatttgtagatagtgcacaaaaattacaacctcgttatttgtctatgattatacctgcgcgctggttttctggaggtagaggattaaatatgttcagaaaacagatgctgaacgatagacatttaagatttatttgtgattatttcaattcaacagaatgttttccaggagtagatatttccggcggaatttgttattttttatgggatagagataacaaaggtgactgtttgattagaactatcttaaacgataaaaaagatgaacttattcgccctcttttagagaaacaagctgacacatacattcgttttaatcaagctattcatatttataaaaaagttaaacaaaaatcaaattttaataatataataagttctcaaaaaccattcggtttacgtacctatgtacaaggtaaagaaaagactgagagcagaagcgtaaaaatttattctaacaaaaatatagctaagtatccagggtatattaaaccttccgagattactcaaaatcaggaatggataaacaaatataaggtatttatttcaagagcatacggagaacgaggagcatttccttattttgtattggggaagcccttcttaggagaacccggaagttgctgtacagaaacttacctagtaataggcccttttaatgccaaggaagaagctgaaaacgtaataagctatattaaaacaaaattcttccgcttcatggtattattgaaaaaaaacacgcaagatgcttccaaacaagtctattccttcgtaccaatgcaggattttagtaaggcgtggacggatgaagaactttacgcaaaatatggtttaacgggagaagaaatagaattcatagaaagtatgatccgtccgatggaaggttaacgggagcaagaaaaagaggagcaaaagtcatggaaaagaacgggcgtttttttgaagggaagacgagcgcacggccaatgatttatgcctatgaggacgccagctatcccggttgtctaaaagtaggatatacggcggtggatgtggaaaaacgcgtagcgcagcagtaccctaccttgaggccggaagggaagaaaccctaccgggttatcttcgcggaaccggctctgtatgaagatggaagcagctttacggaccatgccgtacaccggatgctggagaaaaaaggcgtggagggagtgggcggagaatggttccgctgtacggagaaagaaatcagggcggcatggctggcggtgcgcacccggacggccaacatggaaaaccgtaccagggattttaccatgcgcccggaacaggcggaagccgtggagcggacgctgaactactttaaagcggaacgcgcggatggacgcacgccgcgttttctgtggaacgccaaaatgcgctttggcaaaacctttgccgcttaccagctggcacggcggttgaacgcgcgccgggcgctcatcctgaccttcaagccggcggtgcagacggcgtggaaggaagacctggaaacgcacctggactttgaaggctggcaattcatctgccgggaacaagggccggacgcccagcccattgacgagcaataccggcaggcggacgccggacagcctattgtgtgcttcggctcctttcaggactttctgggggtgaataaggaaacgggcggcatcaagccccagcatgaatgggtgcgggaaatcaactgggatctggttatctttgacgaataccactttggggcgtggaaggaaaacgccaaagctctgttcctgatggaggatgaggaagaagaatacaacaccgcgcccccggaaaccaacaccggcaatgtctgcgatgaacaggatctgcctatcactgcggaccactacctgtacctttccggaacgccgttccgcgccctgaactccggcgagtttattgaagaacaaatttacagctggacgtattccgatgagcagcgcgccaaggctgcctggcagggggaaaataacccgtatgccgccctgccgcgcatggtgctgctcacttaccgcatgccggaggacatccggcaaatcgctatggggggagagttcaacgaatttgacctgaacgtcttcttccaggcggaagggaaagggaataaagcccgttttattcatgaagaatacgtccagaaatggctggatctgatccgcggctcccatcatgccgcggcgacggatgagctgaagctgggcggcaaaaagccccccatgccttactcggatacccggctgatgagtttgctcaaccataccctgtggttcctgccggatgtggcttcctgccacgccatgaacaacctgctgcaacaacgtcagaataccttttaccacgactatcaggtcatcgtctgcgccggaccggaagccggcacgggggcgaacgccctgccgcccgtgttgaaggccatgggcggcaatccgctggaaagtaaaaccattacgctctcttgcggcaaattgaccacgggcgttaccgtcaagccctgggccggcatcttcatgctgcgcaatctctccagcccggaaacctactttcaggcagccttccgggtgcaaagcccgtggacggtggacagtgatcagccggggaaaaaagaaatcgtcaaacccaactgctacgtctttgactttgccctggaccgcgcccttaagcaaatagctgactacagctgccgcctgaacgccaacccgggcaatccggaaaccaaggtgaaggagttcatcagctttcttcccgtgctggcctacgacggcagcgccatgaaacaggtggaagccgcggaaatactggatatggccatggcgggaaccagcgccaccctgctggccagacgctgggaaagcgccctgctggtcaatgtggataacgtcaccctgcagcgcctgcttgccagccgggaagccatggatgccctgatgagcattgaaggcttccgcaatctgaacagtgatcttgagaccattatcaacaaatcagatgccgtcaaaggaatgcgcaaaggaaaagacgatctgacccctaaggaaaaaaaagacctctcacaggaagaaaaggaaatcaaatccctgcgcaggcagatacagcagaaactgatcaaatttgccgccagaatccccatcttcatgtatctgtcagacttccgggaatactgcctgaaagatgtgatcacccaactggagccgcatctgttccggaaagtaaccgggctgacggaaaaagattttgaactgctcgtcagcctgaacgtctttaatgaagctctgatgaatgatgccgtgtacaagttcaaacggtatgaagacgccagtcttgtttatacgggtatcaatcgtcacgcggaggaaaacgtggggctgtacgctaccgtcctgagccgggaagactatgaaatgatggccggggcccagcaggattccatggccggcgctgtagaggaaaaagcccttccctccccaacggcggatgaccgcatcgcctgccgtccggaagaggaagaagaggaacctccgcccgctccgaacgtgcgtattcgtaaagggacgctccttacccaccgggaatacggcacgggcattgtagtaaagttggacgaatcctccggccgaatgaccgtaaaatttggcgaagagaaaaaactcttcccctacccgcgaagcctggaacaaggaaaactcatccctgctgagaaggcaatcccggaaaaagaggggaattaacctctccataaaaacaggagggggcgtcccttactgttcatggagccgcatcatcttaaactcccgtttaacggtacggacgacgcgccagagcagcagcaccgccgctacagacaagccgatgatgaatcccgtccagatgccgcgcgctcccatggccgggacaatccagtccgtacgggcgaggatgtagcacgccggaaatcctaccatccaataagagaagaacgtaatgaaggtaatggacgccgtgtcccggaatcctctcagaaccccgacggaaagcacctgcaaacagtccggaagctggtaggccgccgccagaaccagcaggacggaagccgtgctgacaatcagctccgagtcattgtacaggtgcacaatctgctcgcggaacagggtgatgcctccaaaggtgcacagacagatggtgagcaccagcacgtaggaggacagaatggcggatctggtgcctgccaggtcattcctgccgtgatggtacgccacgcggatggaagccgccagccctacggagagcgggagcatgaacaccaggcctcccacgttcccggcaatctggtggctcgccacctgagtctctcccagcggagccagcaccagagccgccgcgcagaagagcatcacctcgcacagctgggaaacgcctatcggcacgcccagacgcaccaggtgcgtgatgacggaaggcgtaggccgccgccaggaaatgatgtgcctgcggtacggcctgtgcttgggattgaagtaaaccagcaggaacatcagcaggaattcaatgtagaaaatgactgccgtggctgcgccgcaccccgctccgcccatgcggggaaaaccgtacatgccgaagacgaacatgtagttcaggggaatgttgagcagcaggccgcacaatcccacgtacatggcgggacgcgtcatgttggagccttcgttcaggctcttcagggccacgaatcccaggttggcgggaaggccccacataatggcgaacatgtaggcggaagccatccggcacatggcggcgtcatcggaaatccagccgaatacatttctcaacacataaatgaccggcatggaaaccaggctgagcatcaacgccagccacaggccgtggttggtcatgtagcccacgcggctttcatggcttttcccccgcatgttggcaatcacggggccgatgatcatcagcacgccgcaggcgaagagagccacgggcaagtacacggaagaccccagggccacggcggccatgtccgtcacgccggcgcgcccggccacaatagcgtccaccgcccccatgcccacaatggagaggttgaccaccagcaccggaagggccagcggtatcaactttttcatttccttcaaattccacgtcttattcattttttatttccttccatgcatcctcattcaaagagccggaacatgccggcaaacaagccggaccggagcggcaggctccaatccggcttcaaatttaagggttaccaaccgtaccgggccttccgccccgtccgggcattcagcggtcaagcaccacgcgggcacattgttcagccacctggcggaacgcggcggaaaccggattttgcccgggatcttccagggccacggggcggccttcgtccccgccgaagcgggtggaaatatccagcggaatcttgccgagcaggggcactcccagtttggccgcttcccgttcgccgcctccttcgccaaagatatggtaaatcttgccgtcagaggggcactggaaataactcatgttttcaattatgcccagaatgggggtttccacccgttcaaagaggccgatcgccttgcgggcgtcaatcagcgccacttcctgcggggtggtcactaccaccacgccgtccagttcggccgtctggacaatggtcagctgaatgtctccggtgccgggaggcaggtccagaatcagaaaatccacatccccccatgccacgttgcgcaggaactgctggacgtagcgtgtcgccagaggaccgcgcaccgctacaggatcggattcattaatcagcagccccatggaaagaagtttcacgccatgggccgttaccgggataaattcgtcattctcattggctccggggcgttccttggtgccgaacatcagggacatggaagggccgtaaatatccaggtccaccagaccgacggaataccccagcttgctcagggccaccgccaggttcgcggaaacggtggatttgcccaccccgcccttgccggaagccacggcaatgacgtgcttggcgccgggaacggaggatttccaggtagagggatcgtcattgattccttttttggcttccggagccttatgctcgatattgacgtcgcagtgcttcacgccgggcaaatgcttcatcacgccgtgaacgccttcaaaaatgtaacggggaatatccgcatttttgctctcaatcaccaaatcaatcgtgacgttgttttcagcgtcaatgtcaatctttttcaccagcccgaaagatacgatatcgcggctgaaccccggaaattttaccgtggtcagcgcagcccgtatcaattccggagtcaattcctgttgtgtcgtcatatctctgaaatattcatggttgcatcaacattccggccccgcgcctccggaatgcagaatgctccgggatatgaaaaaaggggacggcaaaaccgggaagtaaaaatactcccttttttatttttgacaacgcctaattcagacaaaacggctttttgcccgccggatttgcaatgccccggatactaagaaatggcgggacggccgcagccccgctattggtgaaataaaaaacaggagggagggggaaaatttattccccctgctgcttcagggtctcccggatatcctggagagcggcgatgaaatcatccaaaatttccgcaggcaccataatccggtcccggttggagctcaccttttccgtaatacgcaccactttgccgcgcgcattttgtttgagatcaagaaagaacgtcttgcgttccgcaatgattttttctgtacaaataatatcgtcctccacggctgtaatctacctctggttgaatgaggatttcaggataaagcttccccgctggcgggtcaatgttttatttaccccggcagatgcggccgggaagcaaaaaccggaaaaataacggtatttttccggcagggcatccgttctccgggcaaactggcagcaatccggcgttaactgcggcaacgtggttgactaacatgaatggagaacaggaaagaacacaggagccgtctcaaaaaagaacactgtcgcccgggcctgttcacgaagctcattgatcctcttcctgttcattttgagccatccaaccggcaggaggagctttttccgcccatcagcattccgcacgccatctggcctgttccgtcttgtagagcttgtacgtgacggcgtccgccagggcttccaggctggcctcaataatgttgtaggaaacgcccacagtggtccaggtggcgacgccgtccgaggactcaataagcacgcggacattggagccggttccgttttcatcctccgcctccggaatgttcgtccgggtgggggaaagcacgcgcaccttgtagtcgatgaggtgcatctgctccaattccggataccagcgcatcagggcgcggcgcagagccctgtccagcgcatgcacggggccaaagcccccggcggcggtgtgctccacattgccgtggacatccagcttgagggaggcttccaccatcatgtccgggtgcatttcatggcgtgaggtcagcaccacagtgcgcaggatattgaaatacggtttcaaggcattgtccggcatgtgccgcaggaagagcagctccgcgctggccggggcggccacgtaatcataccccagagcggcatttttcttcacggcagaggaaagcacgtccagaagggggtctcccttttccagttcaaaacccagggtgcgggacagggaaaggatgttgctcctgccgccctgctccgtcatcagcacgcgctgggcgttccccaccagggaggggtcgatgtgctcgtacaaagcggcttccttcatgatcgcgctgacatgcactccgcccttgtgggcgaacgcggcgttccccacgaagggctgccgccggaaaggcgccagattggatacttccgagacaaaggcggcagtggatttgagccgcgtcagggaggcgccgctgaggcaggaaaagcctttcatcttcacctggaggttggggatgacggaacaaagattggcatttccgcaacgctccccgatgccgtttacggtcccctgcacctggatggctccgctgtttaccgcggccaggctgttggcgacggccagttcacagtcattgtgggcgtggatgcccagaagggcatgcggcaggcgttccctgaccgtcctgataatggagctgatttcctccggcatggtgcctccgttggtatcgcacagcaccaggcagtccgctccatgttcccaggctgtccggagcacagccagggcatattccggatcccgcttaaagccgtcaaaaaagtgttctgcgtcaaaaaaggcttcttccatatttttcttaaggaaggaaatggaattgccgatgatttccagattgcgttcccgggaaatgcccagggccacttccacatggcgggggcaggatttcccaaaaaccgcggccacccgcgcaccgctggatatcagggcggtcagcgtggggtccgtctccggagtatgggaaggatggtgcgtgcttccaaaggcggccagctttgcattccttagcccgacacctctcatggcgttgaaaaattccgtttccaccggattggcgccgggccagccgccctcaatgtaatccatgcccagataatccagctggcgggcgatgcggaccttgtccgtcgcgctcaaattgacgtcttcactctgcgcgccgtcccgcaacgtagtatcatagagaaagattttggtggacatccccttgattcatacatgcaaacgggaagccgttcaagaccgggccccggcttttcccctgatgcagacacgaaaagcgcaaggcttgaaggagaaaccggcttccggtaggatggccgccatgagtttactcagacagtctcttcatctctttttcctcttcttctccgtagcccttccctccccggcggccacttccgcccaccctttcctggacagggagcgtcctatccgctggagccggctgacccaggacaagctggaaccggatattcaggaagccatgcgcctcacccggacagccatagaggaaatcagccgcctccatccggaagaaatgacgtatgaaaatacgttcggagcgctggagaaaagcaattatctccttacggaaggcatgtgcaaggcttatgtcctgaaaagcctgtgcgacagcggggaacttcgcaaggccatggattcggtcgctccccgcgtgtccgccttcctttcctccgtcacgaaagaccaggccctgtggaaagtcctgaaaaccgcggaggaacgcctgcggcaaactcacctgagccccgaacaggaacggtacatggaactaagcatgcagagcttccgggataacggcgccgatctgccgccggacaagcgcgcacggcttgagtccattgacagggaactgacgctcgcctcccagcgtttcaacaatttgtatatggatgccaggaaatcctggacctggacggtgcggaacgccgcccttctggaagggatagacggaagcgccctgcagcaggcgcgtgaagaatttctgaagcgccatcccgtccagtccggtccgggctggacgttcacgcttgattccgcggcttccgcccgggtcatggaaaaagcccggagggaagaatgccggaaagatttatgggaacaccgccagtctctggctacgggagcatgcgacacggaacccgtcatcagggaaatcctctccctgcgccgtgaaaaggcgcatttgtgcggatataaggaatacccggattacgccctgcgcgagagcatggcggaaaacggggaaaacgccataaagttcgtcaatgagctgctggacaagatcaaggccccctttttccgtgaaatggaaacgctccgcagcctgaaggcccgccttacggggcaggaaaacgcccgcctgaatccctgggacgtgacatattacgccaatctccgggcagaagaacatttccggctggaccaggaggagctgcgccgccactttccccttccccgcgtgctggacggcctgttttccctggcggagcggctgtacggcatccgcgtgaaggaagttccggcgcggcagtccctctccggcatcccggcaggcgaatccgccggaaccgtggaagtatggcatccggacgtacgctttttcacgattgacgacggcaacggcaaccaactgggttccttttacctggatcttttctcccgtagcaataaacgggccggagcgtggatgaacaccctggatacgggcagcccgtccacgccggaaaccccgggcaagccgcgcctgggcatggtctgcctcaatatccatccccccgcggcaggagacacggtgacactgtcccaccgggaagtcaggactttattccatgagttcggccacttgctgcacctgatgtttaccagggtttccattccttccctggcggggaccagagtgccgcgggattttgtggaagtcccctcccaattcatggaaaactggtgctggcgaccggacgtgctgaaaagctttgcgcgccatgaacgaacgggactccccattccggaggaaatgctgaactctctggacgcctcccgcggcaatacgcctgccctcgcgctggccgggcagctcctgtacgcaaagatggacctggccgtgcattcggaaccggaacgcttctccgccggctctcttgatgatgtggattccgccgtagcgggagatatggattatttcaaagatttcaaaagagccggcaagctgcgcacggcgcgtcacttgttttcctctcctgcgggctatgcctccttttatttctcctaccaatgggcggaagttctggacaaagatatttttgaagcctttgaacaggccggaggcccggacagggaaacggcaggaaaattccggaaaaccattctggaaaaaggctatgctgtcccgcccatgcggcagttcatggatttcatgggaagaaagccgcgcatggacgccatgctccgcaaaaggcggctggcatcctgaaataaaggattcccaaaccgcagcagcctcttccgcgcggtacaggcgcaagtcacatattatacatttgtttaattaaattatcccttcattatgcaaatgttacagatattttgcagaattcagaacacatctttgcgttgactttgcaagaaaaagaagagaaaattcttctgctttgccgcatcttccggcaccagccgcaaccaaccgcattcatttatgtataataagcctttgacgtttgccgcaacaaccctgctcctttgctccccggtgatgatattaacttcctgcgaaggggaaaaggattccgcagcccaggcgccggcgctcgttcccgaagttcaggtgaccaaactggtcacgaaggatgttcccatcaggcaggaatgggtgggcaccctgcgcggcacggaagatgccgaaatccgctcccaggtgacgggatatcttctttccaaggattaccgggacggcgcttatgtcaagaagggccaagtgcttttccagattgatccccgcccgttccaggcaacgctggaccaggcccaggggagattggaacaatatgaagccacgctgaaaaaatacaagctggacgtggaacgctacaccccgctggtgaaaaccggctccgtcagccgcaaacagctggacgacgctctgcagcaggtccaggaaacggaagccgccatcgccacggcaaaggcccaggtggatgaagcaaaaatcaatcttaaattcaccaccattacagcccccatttccggcctggccggcctggcaaccccttccatcggcaacctgctgacgccctccagccccacgccgctgaccaccatttcctccattgaccccatccgggtggatttctccgtaagcgaacgggacttcctgaactccatggacaataatctgaccaggcagaagcacctcaaatttgacgtgattcttgccaacggcacggaatatcccatgcagggcgaacccgtggccattgacaggaatgtggatgcccagaccggtaccatcaacatcgtcgggcacattcccaatccgaacctgacgctgcggcccggcatgttcgtccgcgtccgcgccacggtgaaaacgctggaaaacgctgcgctggtgcctccgcgcgccattctgtccgcccagagcgccaaattcatcatttacctggatgacaagaacattccccacatgcaggtcgtcaacctcggccccgttgttgacggcatgcaggtaatcaacatcattcccatgccgcactccaccttcacgaaggacagccccatcgtggtggagggaatcatgcaggcggccaaggtgcagggacaagcccccgtcaagccgcttccctacaagcccgtagtttcccagcccgtcatgccctccataggggcccagtcctttgaaaaggccaggacgccagaaggcatgaaggatggagaagcccagccgtccgccaagtaacctcccttatccggagacccagcatcttcccttttcccgcgcattttcatgatttaacgccatgtccagcttcttcatcaaacacccgaccattgccatcgtcatctcgatcgtgatgatcctgctcggcggcctgtccctgatggggctgcccattgagcagtatccgaacatcgtcccgcccaccatcaagatgcaggcgacctacccgggcgcgaatgcggagacggtggccaattccgtagcctcccccattgagcagtccatttccggcgtcgtggggatggattacatgacttccaccaacgccaacaacggcatctgctccctgagcatcgtctttgaagttggcacggaccccaacatggatcagactctggcctacatgcgctacgggcaggccaccgcccagattcccgcggaggtctcccagatgggcatcaccatcacgcagtccacaggcagcccgctggccgtaatcaacctgtattctccggatgacagcctgaacgccatcttcctgagcaactatgcctacgtgagcctggtgcaccccgtgaaacgcgttcccggcgtgggcgacgtgcaggtgttcggcgcaggccgctacgccatgcgcatctggctggacaccaccaaaatggccgcccagaacatctccgtgggagaagtccaatccgccatccaggcgcagaacaccgtgattcccggcggccagatcggcgcggagccggcccctcccggaacggaattcacatacagcatccagaccaagggacgccttcagacggctgaggaattcggcaacatcatcatccgtgcggacgggaacaagcttctttacctgaaagacatcgccaaggtggagctgggttcccagacttacaacgtatccagcaaatacaacggcagggattccggcgccatcgccgtgtacgccgcccccggctccaacgccatcaacacggtggacgccctggtcaagctctttgaagaccgctcccgcagcttccccgccggaatggaatacaacctgacgctggacaccacgctggccgtgcgcgcctccattgaggaaattgagcacacgctggtggaagccctcctgctggtggttctggtggtgttcgtcttcctgcaaggctggcgcgccacgctgattccggccatcgccgttccggtttccatcatcgccaccttcgcgctgtttccgctcctgggcttcacgttgaataccatctgcctcatgggcatggtgctggccatcggcctggtggtggatgacgccattgtggtggtggaagccgtggaatcccacatggaacgcggcctcacgccccgccaggcggccttcgccgccatggaggaagtatccggccccgtcatcgccatcgccctggtgctggcggcggtgttcctgccctccctgctgctgccgggcattacaggcacgctcttccagcagtttgccgtgaccatcgccatttccatgctcatttccgcgttcaacgcgctgacgctctccccggcgctgtccgccattctgctcaaacccaaggacccgaccaagggcggcccgctgaaatttttctaccgcgttttcaaccgcagttatgacgccacggccagcggctacaccaaagtgtgccacttcctgacccgcaagctcatcatctccattccgctgctggctctgatcgcctacgcgattgtccccgtagccaagaaaatccccaacggcttcctgccagacgaagaccagggctacctgttcgcggccctgatcatgccggaagcccgttccctccagctgactacggccgccgcggacaaagtttccgaactcatccgccagaacccgaacgtaaaagacgtgattgccatctccggcttcagcctgctgacgggcgtgcagagcacgaacaacgccttcttcttcgtcatgctcaagccctgggaggaacgccccaatccggaccagagcgcccaggcggtcaccgcccagctgaacgccctgctgaccacgaaagtttccgaaggcatcaccatgtgcttccagcctccggccattgcaggggtaggttccgccaacggcgtcaccttcatgctggaagaccgcgacggcaagggcacggaatacctggcggaacaaacggacatctttgtgaaggaagcgaacaagcttccgatattcgacccgaacaacaacggcggcgtgcgcagcgtgatgtccttcgccgtggaacagaaagatgtgcggctggatgaagaaaaatgcgccacgctgggcgtcagcatcagtgaagccaacagcctgctccaggcctacatgggttccctgttcatcaactacatcaccctttacggccagcagtggcaagtgtacatccaggcgcagggcagtgaccgcaccggaacggacatgctcaaaaacttctacgtgaagaacaacacgggaagctccgtacccctttccaccctcgtgaaaatcacggacatcaaggggccggaattcctgctgcgccagaacctgtacaactcatccaagctcatggtcacgcccgcccagggctactccaactcccaggccatggaggcgctggaaaaaacctttgaagccagcatgccttccgacatgggctacagctatgcggacatgagctaccaggaacaaaaaatccagaacggtatcggcatcgtgcagattttcctgctctcctccgtctttgtcttcctgattctggcggccctgtatgaacggtggtccctgcccctcagcatcttcatgacggtgcccatcgcggccctcggcgcgttcctgggcctgtactggttcggttatgaattgaacctgtacgcgcaaatcggcctggtgatgctcatcggcttggcggccaagaatgccattctgattgtggaattcgccgtcattgaaatggaacgcggcaaaacgctgatggaagcgacgctttccgccgcaagaatccgcctgcgccccatcctgatgacatccttcgctttcattctgggttgcgttccgctggcgctggcctccggttccggcgcttattcccgcaatatcatcggaatcgtggtcattgccgggatgacgatggcgacggtcgtgggcattttcctgattccgtgctccttctacttcatcatgaagctcttccgcgtacgcatcgcccggaagacggtggaaacggaagacccggacgaaatcatcgcccgcaaacacctgttccacgaagcccatgaatcattaaaagggtaaaaccgcccctgcaaccatctaaaaacagactaaacgcatatgcgaacaaacccatacatcacacgcgccatcctgctgggaacggcttttgccgcctcctcctgcatgatgggccccgacttcaaaccggtggacatgcccatgcccgcggcattcaggggagcccctgcagcgacggaatccattgcggaccttccctggtggaaagttttcaaaaacaaggaccttcaggacctcctgacggacacttacaataacaaccgcgatttgaaagctaccatggcgcgcgtggaaaaggcacgccagtacatcaccatcacggaggccccgctcttcccgtgggcgaattattccggatccgtcagcaaaggctccaactataccggcggcagcatcgcccagactaccggaaccacattgacgccaggagcgattgatgccggcatttcctgggaactggatatctggggcaaaacgcgccggatgacggaagcggcccgcgcggattatctggcttccgaagaaggccagcgtgcgctcatgctttccctgctccgccaggtggcggactcctacctccagctcctccagctggacgaacagcttgccatcgtgcagaaatccgtggaatcctattccgaaagcctgcgcctgtttgacgaacagcttgaaggccaggtaggcgacaggctccaggtggcttccgctaaggcggccctggcttcctcccaggcccagattcccgctattcaggtgcaaatcgccaatctggaaaacgcggtctccgtcctggccggacgcgctcccggccatatccgccgttccggcagcacccgggacatcgcctataacgtcaaggttcccgccggcattccggcctacatcctttccagaaggcctgacgtccgccaaagcgaatacaagctgcgcgccgccaatgcggaggtaggagtggccattgccaactacttcccgaccatctccctgacggcggcgggcggcctggcctccgcggatctgcgccacgtgcagggacgccgcggcggctggggcctgggaaccaatctgaccggccccctcttccaggcgggcaagctgacggcttccgaaaagtcggccaaggctgaattcctggcggccagaaacgattatgaacaaacggttctcaatgccctggcggaagtttccagcacgcttatccagagggacaagctgcgcagcatcaccgccacccagtccgaagccgtggaagcctaccacacggcggtgaaactctcctttgagcgctaccgcacgggtctttccaattacattgaagtattgtacgcccagcagaacctgtaccccgctcagattcagctttcacaatattattaccagcatgccagcacgctggtttccctgtatacggccctgggcggcggctggaatatgagccacaaggctatcatggacggccctgccaggcggtaaaacgcgccctttaaaacagggaattttcctgattgttttttcatcctccggcaagtacagcttgccggaggatttgctttccggccatgtgtaaaacgccggttctccaaccgcctccctgtcccgtccggagactgcgggccaccttcgcccggccgcaggaaccgcaggccgggaacggaattcccaacggagaggccctttctcctgttccgcctcgcatccggaaagcgcaaggtctccagccgcccccctctcttctttccccgcggaaacggaagccatgtcggaatcgattcaatttccgcccactcacggtcaacaggccgaggaacaaattcatcgcgtttttcaggaatgaatggccgttgctcccgatattccatcatttccagcaaggtaaggatctcctgcttttatcgctgatatttaacctcctgccggattcctaatccgttgcggcatcctgccccaacaattaaaaatattgatgataaatgtgttgtttgactcaatgaattgattttcagtagtgtttccgggcgctggtcttttcccggcccatttctttcaccatgattttccaaactttactcctgttggaagggcaggatgccgcaatcggattaggaatccgataaaaaacggaagtttcttacgcggaaacattttagcaactattgtaataactcacatgaagactaaatatcttgctgtcctgatcgccgccatgggaagcagcctgtccttcggggcttccatcgacggtctggacgcggcttattcaaaaaatctcaccgtctatgacggaacctccggcgatacgctgtctgtgtcatcccccacaactattggcgtcaacaacacaggcaactggacgatggcattcacgatttccggtctgggagctacttcagattcaaatgtaggtttgctgtttacctacaacaccggctcgtaccagaatctggaagggctgggattccagcttacggagtccggagatctcaccctgtgcgccggaggttttgcttatggcggagggactgctgcctcctccccctggaaaacgcaaacgttttccggttattccgccagcacccccctgactctgttttacacattcagcaggggaactgtttccatctccgccatgctgggggatgacacgtccacgctgaccacgctgagcaacctcagcagcggagccgccttcagcggccagaacatgtcccagatcaatttttccgccaaagacgcctccggaaacacatggagcgccccgaacggaatcacgggagaatataccctgaataattttgacctgtacacggccgttttgacggaagaccagatgagggaatatgccctgagcgccgttccggaaccggctgcagcctctctcggcctgctggggctgggtatctttctgatgcgccgccgcagggcctgactttttccttaccgcgtccattcctgctccgttcagggatggacgttttcttcactctttttcaaatatccttttcatttttcctttacgctctgatgaaagtccggctccctctccccctcctggctgccctggcggcggcattccccgcagcaaccgccgccccggcgggcacggaactgggaaacgtcatgttcgttggggattccatcacccacggggtcaacagcgcctcctaccgctgggccctccataaaatatttacagacaacggcatttcctaccgggcggaaggcgtcaaaaccggcaattattccgggggagttactgcgggcacttcctacgggggccagatattcaacaatgaacattcctctcaggcaagcgccagggcctgggaaatatccggcaggagcaacggaagcaggtttgacggctccaacatttacaactggctggggctttccggcaccaaggcaaacggaagcgcctattcaggccagacattcaccggagacaatacgccggatacctttttcatgatgatcggcaccaacgatctcctttccgacggaaacaatgccacgctggcggatcgccttgactccgtttcccaaaacctcctgaacgatatggacaccatcgtggaggccatgttccaggccaatgaacatgcgaatgtcatcatccttaccattccctgctggacccggcactccaacggcaactcggacgccacccaccaggccgtggctgattacaatgatcgtctgaaaacatgggggaatggcaggcagaacgtcacggtcattgacatcaatgccggcatcattgacgtagcatcctccacgccgttctacggcgtaagctccatgttcaacaaccccggcagcgacggcctccatcccaatgcccagggagatctgcttatggccggcaatatcgccagggccatgggctatgcggggcgcaccgccggacaggaaagaaaagccgctggcggcctggccatcaattttcaccagggcgggcaatcccccgcatggaactcgaacagccagttggaaaataaagggttttccctcgccaacgtcactgtggacgagaacggcatcagcctggggcaatccggggaaagctccatttcctattcctgggcggaagggacggagctgcaaaacggctttacctttgattgcaacctggttctgggaaacggcgcagcagacggatgggatactgcctccgatttcagcatcagcctggggaacagctccttttacggcacgctcaatattaatgaggcctacatcaaatggggcgatgccattctgtattccctggacatgtccgccaatgcggaaaacctgcgtatggcatatatctgcggcaatgatatggaaggactgaaaggcggctattacgtctggctgggagacatgctgattggggaagcgctttccgttacctccggctccggctgcaacggcctcaccattcaatacaacggcagcggaaccgctgttctgcacgacctggccctggacggcacgggttcctatgcccctgccacttccggaatgcttaacgcggaaaagtcttttatttcttccggctccttcacccagggtggaacaccggaaggcaatattgagtggaaaacggagggattcaccaaaaccgctgataatctggccggctccggtacctttaatgcccgctcccaggcggattcctccgcagggggaacggggaattccgtaaacgtctccattacctccggaaacgccactcatatttatgcgaacagcggcaactacacgggagacgtctggctgaccatctccaaggagggacaagcctccgcctggtacggagctcacggagcttccggcacgctcaacgggaacaccttcctccgtttcacggatgccgccacaggcggaagcacggtcttcggagccgtgaacgccgccggcgtcaccggaaacgtttatctggaattctctgcggaaaacgcctccttcggcacctttaccagcagtaattcctcctctgtggtcggctcctatgccacggatatccaggggaatgtggacattgtggtcaactccggctccttcaaccatcaaatcatgggcggcatcttcgcaaatgccaggaccggaaccaccaccattggaggaaacacgcatgtctacatcaacggcggctccgtcaccggaaatgttatgggcggcggcctgacaggctccatttccggcggcgccaacgtcaccgtcacaggcggcgttatcagcggttccgtttacggcgcgggccagggcggctccatcctggcaggaagctcggtttgcttgacaggaggcctggttaaaggggacgtctacgccggaggcaaggcgggttccattcagggggacacgtccgtcaccatcaccggaaacacggccacgctttataacgggagctcctggggcagcatctccggcggcggttccggcggaacggtggagggaaactccaccgtacgcatccagaatctttcctcaggaacgacggcctacggctttgacaaatacgccggaaacatcagcggaggaaccaacgtaagcggagacaggagcctggtgctggaccatgtaaccgtggacagcctcctggcttccctgagtgacttcacccatatctccgccgtcaaccagacccgcacctcactggattccctggacggggcgctcaccgtaaccattgaggcgggaagcagccttatcctgaacggaacctctgacctgaccacgcttattctgggggaacacgcctccctgacgcttcaggggctcaccgcagatgcggtcgtcgtggacatcacgggaacaaccaattacacactctccctgacagagatacctgccagcctggacaatatcaaattcctgaacgacggcgttctgtacgacgcggccatgtccatggatcttcaggccaattccgccatgcttttcgcccaggtgccggaacccggaagcgccgccctggccctggcaggactggccccccttctgtggaggaggcgcagaaaaatgtcccattgaggcccttcgttttcttcaggccctgatggacaaaagaagcccccgccggcgcaacgccggcgggggcttcccatgcggaaaaacggcggagaagaaaaggaaaagcatccatccctccccgggcgtttttcatggaacaggggggatcaggcccctctgtttttaaacagttccagtgcgagctgggaccaggtctccagtttctcaaacatttccccggacaattcctccggagaaacaaaacggagattggccagggccgcttcattcgcgcgcacacggtccgtatccagctcaaacaggtggacaatgcccagatgcacggcccccacgtcattggtatcgtcattaatcacgccgagaacccgctgggtgcagttcccgtcaataaccagttcctcgcggatttcgcgctccactccggccagataggtggaaacgtcgtcatggccggattggcggtccaccggattgatatggcctccgatgccgatggagcccttgtcatgcaggcgggcctcgccgccggagcctccgcgcgtgtaatgcagaatgcggccctggtggcagaaaatggcataggcgatgatctgtttgtgggaagggtcattttccgcagcctcccggtccatgaacgaggcgacgcccggcttcatgaacgcattcagataatgatccccgccttcccgatgtccctggaaatagcccgcttcctcaaaggcggcgcggggaaccaccagaacctgttctccatggtaacgtgacatggaaacaccctacccgttttcatcccgcgctcaacaaaaaaggcgctgaaacggcaaatttgccccttccttcaggaaggcgcgggctgcccctccgcatcaggagacatccctcacttccacgccatgattccggaacctgcgcatgatgctttccagctgttccgcatccatgagatggagcggcagccacagcaccagcttcttgccgaacaggaacagcagcgcgtggcgcgtcctgcacaacgtggaaaaacggtcgtagggaatattcatggggtcaacgcccttgctggagaacgtcaggtaatcctcatgaaaaacgtaatccttttcctgatggtacatgggcacctttttattggcggccagagcggcctttgccagaaaggggacgtaaaaccaggacaggataatcgccatcagcgccccggccagggacagccaggcgaataagggcagtgggcgcagggaaaaggaatacagcgccatcaatacaaaaaaggccgtaatggccaggtccagcggctttttccacctggggcgcaccgcatggtaccatgccaccagcacctgggttgccaggcggtcggaaggtacgggcttgacgagtttgatgacttctgaatcctgcatcatggcggcagggtatcttcattcccgctgaagaaaaagcctaaaagcaggctcttccgccgccattgtgtcaaaaaagcccctccggaaaggtctcttccccctttttcccgcctcccattcacgggggaaagcctccttcccccgtatgcaggccagaatttccttgataatcatgcctcccttcatagaatgaaaaaccaaaagccttcagaagacccggtggcagacaatcttcaaattcacgtacgcacgttccagccctcaaccactcaggcacaggctctggaaaccctgacggattccatggcggaagtccttgacgaccggcagctaagacacatcaagaatgcggttcttctgcgtgaggaaacgcagaccacctatctggatcacggcctggccgtcccccacggacgcaccagcgcgctggattccatgcaggtcaccgtaggcatcagcccagagggcgtcctctggccggacgattcccgcaacgctcatctcattgtgatgctgggcgtgcccgccgccatggtgaccggctacctgaccaccatgcaaaaattgctgcggtggcataaaaacgcccccctgggccccaacggggaatggacgggagatgaagccagcctcctggcgtcccttcaacaagccctgcaatgacggacaagaaaaaccagcctgcggaaaagacgcgcctttcctggtcatggctgcgcatggcgttgagcctgcgtgaaaaaatcaagctgggggacaagcaggtcatcttcatctgggcggtcgtcgtcggagcgctgggtgccctgatggcccttgtctttgaaatgggcgtggaactggtgcaggacgtcctgacggggcggaccagctacaggcaaattcaggtttttcaggaaatggccagccaggagccggcctggtgcatcttcgttccggcggcgggcggccttttggcggggcttacgcttcttttcacccaccgctttgtgccggccaaggcgacggaatacatggaagccgtggcgctgggcaatggatacgtgcctcccaagcccagccttctgcgttccctgtccgccgttttctccgtaggttccggcgcatccatcggccgtgaaggcccgctggtgcaggccgccgccgtagcgggttccgccctggggcgtttcttccacctctcagctcctcgcctgcgcctggtagtggcctgcgccgctgcctccggcatgtcctccgccttccatacgcccctggcgggcggtctgttcgtaagtgaaatcgtcctgggcgcgctgactattgatttcctggctcccctgctggttgccagctgcgcggggtactttaccatgggcctgttccatgaacccgcccccatttaccagctccagcaggaagtttctctggcgggcaaccagcatgtgctctggtgcgtgctgctgggggcccttgcctccctggtcgccagtttctggctcctcatcctcaaaaaatcgcgccggtacctgaacggcaagcgccaatggctgcccgtgcgcctgacggcggcaggcgtgctggtgggagccatcgccatcttttacccggaaatcgtagggaacggcaaaaatatcatcacctccctcattcattatgaatttgacgccgcgagagccgccgtcctgctgttcctgaaaatattcaccgtcgccatcgtcttcggcgtgggaaccgtggggggcgccctgacccccagcctgactatcgggagcgtctgcggcttcctgttcagcgcggctcttacccagctgggggtgcccggggaccatgccatcgcctattccctggtgggcatggccgcctttttcactacagctgcgaacgccccgatcacctccctggtgctggtggtggaattcaccatggccgggcaaatgatgttccccctgatcatcggcgtgctggtttcctacggaatggccaggctcaccaaagcccagtccatgtaccatgattccctggccttcggccccagaagcacctttgacaaacccctggcccaggtacagcttcaggatgtagcgcgcaaggatccgcccgtggtgcatcccctggacaaattcggcaccattgccgccatgctcattaaaaacccggcccagcccatcttcgtcacttccccggccggcaaatacctgggaagcgtggtggcggaagacgtggcggcctttgcccgcaacaaggagctggcccaggccgtactggccatggatgtgctgcgcagcgacatgcctacgcttcctgcggacatgcacctcccggaagccttgggtattttctcccgcccccactgcgcggaatccctggcccttgtgaacccgaacaacgatctgctgctgggcgtagtcaacaagacggacctctacctggtgctctctgaaatcatgcgcagggaaaaactgcaataaaatctgccttgccgtgctgtatccgttgaaataccggaaaaaacgccgctcccttccgcggtttgcgggaaatgcccgttcaaggccgaacacccttcccgtccaaagggcaatttcccattcttcgtgtctgcagcgtccagccttcctttcacgccctaatccgggcatgacctccggggaacgacgcatccggggctccgttcatgagaaaacacggggcaaaggcatgcatttcccggcaaattgccctgccgccgtcccggaacgtgaatccggcttcttccgcaatcctctgcccggaagtcttccggaaaaatttgttccttccaggaaacgcggacaagcctggaaatgcattttttccaccctcttttttcatgataggggtcaggtcaaaaataacaacaaacttgcatttcagaccttttccggtacgcttccggcatgagccgcaccctgagaatagaataccccggagcagtctatcacgtgcagagcgagggcaaccgcggagatgccatttacctggatgacgaagacagggaaacttttttgcgaacgtttcaggaggcagcccgcagaagcggctggaccgtgtacgcctacgccctgatggccaatcactaccacattcttttccaaaccgcgcgcgccaatctggtggatggcatgaaatggctccagactgcctatacccagcgttttaacgcacgccaccgaatgcggggtcatctgtttgcgggcagataccactccatggtggtggaagcggataacgcccactatttttcaaccatcattgactacatccacctgaatccggcccggtccggcctggcgcgacgccacacgttcctttccggctgcaaatggacgagcctgcccgcatggctggcctctcccgccaaaaggcccaaatggattcatccggaacgcggcctcgtctgcttcggctgcgacgacacggaagacggccgccaaaaatacctcaaccatctgatgggccgttttgaagcggaacgcatggatgaacgctccctgctacccgccggccacgttggccccggcaccgtccagcggggctggtgctatggctccagcgccttccgtgccaggctggtgggggaacttccccgtctggcgcgcagaaagcccgtcacgacgggcatgcgagcgtcagaaattggggagtaccaggcggaaattattgtaaaaaacggtctgaaggcctttggcctctcggaggaggagctgcttgtcacgccttacagccacccgtccaagctcatcatcgccctggccgtccggcaaagcacgctggtaccgtatgcatggatcagcaaccggctgcacatgggcattcccaaatccatgggaaccttgctccaccgggcaaaaaaaatggcggaaacggatttgaaaacgagggcgtggatcgagcgcctgagctcctgacctccgttcctcccacggaataatttgaaaaaaatttcctccctccacaaggatgcgccgggcatgaaaccgtcctcccgcggcaggaagcactcaaggtcagccccttctccggcgcatcatcatgcaggccagcccaagcaatcccacggatgccgcagtcggttccggaactactgaaaaagccatggaggcaattccggctttctgccaccaatgcggaaatcaagatggctcccacccatcgttgtttgtaacactccagctctgccgccttgctgttcctgataatttttcctttgtcatccattcttcatggacaccggattcaaaatccaccttatggaaacaggaacccgaataaccgcatacaaactccatatcccagcatccggaacacgcagttctggcaggcgtcaatcagcaagaacggggtcagtttacaaatcacaacatataaacatattttctattttcttactgacccctgaaggccgccagggaaaaaaatgattgccagtccgcttcgcggaatgataaacggaaggcgcgtgcgaaaaactgcgcgtaaagcgtcaacccaaatacaacaacagaaaagatggcacagacatattcccagcgcgtgctcgacttggtgaaggccaagcatagccacgaaaaagaattcatccaggccgttcaggaagtgctcagcacgatcgaaccggttttggccgcgaattccaagtatgaagaccacgcgattctggaacggatcgtggaaccggaaagaaccatcctgttccgcgtgccgtggatcgatgaccagggcaaggttcaggtgaaccgcgggtaccgtgtggaattcaacagcgccatcggaccgtacaagggcggcctccgcttccatcccagcgtcaacctcggcatcctgaagttcctgggttttgaacaggttttcaaaaactccctcaccaccctccccatgggcggcggcaagggcggttccgacttcgatcccaagggcaagagcgataatgaagtgatgcgcttctgccagagcttcatgacggagcttcagcgccacatcggcgcggatacggacgttcccgcgggggatatcggcgtgggcggccgcgaaatcggctacctgttcggacaatacaagagaatccgcaacgaattcaccggcgttctcaccggcaagagcctgaactggggcggctccctcatccgcccggaagccaccggctacggttgcgtatacttcgcccagaacatgctcgccacccgcaacgacgacttgcagggcaaagtctgcctggtgtccggttccggcaatgtggcccagtacaccgtggaaaaacttaacgaactgggcgcgaaagcggtcacgatgtccgactccaacggctatatttacgatccggacggcatttccccggaaaagctggcctgggtcatggaactcaagaacaagcgccgcggacgcattgcggaatacgtgaagcagttcccgaaagcccagtactttgaaggccagcgtccctggagcgttccgtgcgactgcgctttcccctccgccacgcagaatgaaatcaacggggaagacgcccgcaccctcatcaagaacggctgcaccctggtggcggaaggcgccaacatgcctacggatctggaaggcattgaaacctacctggccgccaaaatcctgtacggcccggccaaggccgccaatgccggcggtgtggccacctccggcctggaaatgtcccagaacagccagcgcctctcctggacgcgtgaagaagtggaccacaagctgaagaccatcatggccaacatccacgcaaacgccgtggcccacgcccatgaatactcctccgacaaatccttcaccaactacgtcaccggcgccaacatcgccggcttcgtgaaagtggcggattccatgatcgaccagggggtagtctgaccccggcccgacatacttgctgccaatgtaaaacacaccagaagcgccgggttcgcccggcgcttctcttttctgcggaaacgtctccataccggaagttcctttttcctgtatgagccagacatgacggcggaaggacttcaaaagcctcccggcattggggacaaccaccctcaggactttttcccggcggcagggactttatctgctgcaccacggcagtctccgggtattcattctccgagttggactgggcggtcaaaaacgagccagatgacctgtctccggaatttgaagggccattctcttccccttccccattttcccgcatcaagagccggaaaaatgcttacccggctccgatgcttaaaaggtactgttattcatttaacaggcggcagacggcctgggccgcatgttccgccgcccctccctgccccaacttgtcggaggcctgtttcatttcctccagcagggcatccctgttttccggaacaagcaggcgttctatttcatcaatcaccttgtccggtgtaaaatcaaactgaaccagctccttcaccacggggttctgcgccaggatattcaccatgccgatgaagcgtatcttgatgagcatgcgggccatccagtacgtcagcaggggaaccttgtacaccagcatgtacggcagacggtgcaaggcggcctccatcgtggcggtgccggaagccacaactcccacggcggcgcggtccatcagctcatgatattttcccaccgcaatgtggaacagttccggaggcatgccggctttccgcaccatgccgcgcattctttccgccagagcctccgtggaagcggcggtttcaaaagacagttccggccgttcccgggaaaggcggttcactacctctataaataccgggaaatgcctgtcaatttcacggttccggctgccgggaaaaagaccgaccagtgacggatcccggacgccctccttacggatggaagcaatttcatctaccaggggatgccccacaaactccgttctcagtccggcttcctggaacaagggagcctcaaaagggaagatgcacatcatcaaatccagcatgcgcaccatcttgggaatgcgcccgcgatgccatgcccacacctgcggggagataaaataaacgattttggtgcgggggcagcacttgcggaccctctccgccagccgcagattgaaccccggataatcaatcaaaacaaggcaatccggctggtcctgccgtatcctttccagaatggagagaaaacgccttctgaaccatccgtattttttgagcacctccaccacgccgataacggcggcttcatccgcccagtcttccacgccgggacataacgcgtgcatgccttggccgcccaaccctgcgacctccatgccgggcatcaggcgcagcagattcttcaacagcagggcgccatgaatgtccccgctcttttcgcctgctataatataaagcttcatctctatctgcatcggcgcacgccggacgcctccctaccttaccagccccgttcccgggacgcaataaaagactttcctttcaaggattttaatgcaagatacgcgccgttatgcatgagttgatctcactttggatgtcctgggtgcaggactggggatatgcgggtgtcattgtcctgatggccatggaaagctccatctttcccgttcccagcgaagtggtcatcccgcccgcggccatcctgtccgcccaggaaggagcatccatgagcttctggggagtggtggctgccggaacgttcggctcctggctgggttctgccattacctacgccgtggcccgaatcgtgggccgcccggtcatcatgcgctggggcaaattctttttcatgccgccccacaaggtggaaaaggcggaaatcttccttcagcggtacgaagtttccggtgtcttcttcgcccgccttctgcccgtcatccgccacctcatttccattcccgccggcattgtccgcatgggattcggcattttctccctggtcaccgtgctcggctcgtttgcctggtgcacggtgctcgcctggtacgggcaccgcatcggggaacggcatccggaattgctcaaatctccggaggagctgatccgcaccgtcaaaagcgaaagtctcccccttattctggccgtgctggttctggccgtctgttacatactcatgcttcgtctgacggatcgcaacaagccggaaaaagccgcagcggacacgtccgcagaaaaagagcagtaacccccctttttcccatgatcccttccaaggaagaccgggcagcccgggcgctggattatttccaccagggatataattgttcccaatccgtttttgctgcttttgcagatgtctgtggcctgacggaagaaacggccctgaaactgtcctctcccctgggggcaggcattggacgcatgcgggaggtatgcggcgctttttgcggaatgagcatgctggcgggaagcctgtacggaaacagttccccggaaaccggggaaaaagaaaaaatcttttccctggtccaatccctggccgcctccttcaagcaggaattcggcactctttactgccgggaactactggggctgtctccggagagcttggcagcggaaacggcgcgccccggagaaaggactgccgcctattacgcctcccgcccctgtgaacgctgcattgccttctgcgcccgctgcgcggccgagctggaagcaaaagcccggcatcatgaaaatacccggccccctttgcaggggaaccgggcgctttaaccatacgcaaggcgccgtcaatgagaggcggaactgctgcatgcgccgtccgggcaggacgccttcagcttgtctatcttttcattggtttcccccatcccctcgtcataaaagccctgctcgtcaggggccagcacctggaggaggcggagaaattcgcccgcgtgttccttttcctcattggaaatatccagcagaacttcctgggccagcttatggtctatggattctgcaagctgggtataaagctggatagcttcatattccgctgcaatcatgaaccggatggctctcaccaattcgtcatgggtgagtttccggttttcctttaatccgctaaatgcatttgtaaattcaggcatgcagatatgacccagattgcaatgaatacattcaaaatgttcctgtcatatattttcagcgacattctttgaatttttattcataaccaatggtctaagaaggccagtatcatcccgaatacggatgaagcacggggtttcacttatactgcccgcttttacaatacattcccgccactggcacgtaataaggaaaagagataccgcaagaccggaacagaaaaacgcccggcttcacctgaagaaaaccggacgttttacagcaaaggatgaaaagcaccgtcaatgggcggcggaactgccgcatgcgccgtccgggcaggacgccttcagcttgtcaatcttttcattggtttcccccatcccctcgtcataaaagccctgctcgtcaggggccagcacctggaggaggcggagaaattcgcccgcgtgttccttttcctcattggaaatatcccaaagcacctcttgagccagcttgtcatcaatggaggcggcaagctgggtataaagctggatggattcatattccgctgcgatcataaaccggatggctctcaccaattcgtcatgggtgagtttccgatcctcctttaggccgctaaatgcattcgtaaattcaggcatgcagatgggacctgatacgtaacccattcattcaatatgctttgtcataacttttatacgatggtggccttaaagcagtccagcgaacaaatttccagcctctcttgccggaacaaaaaaagagcgccggattctcgtccgccgctcctgttaatcaagctcctctccggaacacctgccttacttgccttccgcagtcttgggtgcgtatttcttgaaaaattcaacgtactgggcgggagtacggccgggaacataacccgtgcggcccagctccttgccatccgcatccaccaccaccatggccggcacgccggtaatgttatacgtcttggcttccttggacttgctgaaatccgaactgccgaactcaaatttgacgccaatggccacgccgtccatgccttgtttgaagtcctttttggaaaggatttctttctccagcttaacacaaaagccgcaccaggacgttcccgtgaaaagaagaacaatgggaaggccggtttcctccgcctgcttttgagcgcttttcaggctcttgccccagcggaatttcactttcgccgccttggcagccttggctgcggcttccttgtccgtgggaacgctttgagccatggaaatgccggaaacgctgaaccccagcacagtacacaatgcaaaaataaaatgtctgttcatcatactctgtgaaacgttcctcttagactagcagaaatactttgtataggaagagaaatcagtgtctttttcctcgaaggaactcttccgtcccccgtccccaaaatgaggcgttctcaaaaaaagtattgctctttcctccttaatcgggtaataatccgcccgcacttacaaatgcgcggttagctcagtggtagagcaacaccttgacatggtggaggtcgtaggttcaaatcctataccgcgtaccatttttcttaaaaccccgttcctttccggacggggtttttcattgcctccctccagtcaatagacatagcatcagccttcccccgtaacaggctcaattgaaaaatgccggcataaagagacggttaatgcagaagtttgcgctgataagaaaaaataccggatatctccctctttactcacttacagtgaaagacatgatgagcatttaacctcattagtctcccatacagggaaaaatgtttttccaactttttttgaacacaagccccttcccgggacgctaatggtaggagggcagcttaaggccccagcccttaccccctccttccctgatgaaacaatgactattaaaagcccggcggaaagcattccgccgggcttgctttttataagactccgccggttaaaacgtccgggaaattaacgggtagtcaaacgatcatataactcattggcatatttatgattgggatggttcacattcatatacgcctcataaagaggatgggatggatccgattccatccgcatggcttcctccgcaggggaaggcgccgcatttcctgtatgatggagaggagcttcatcaagcaggcgtgatgcctggtacaacaggcggattgcatccggattggaaccgagtcccggattatccagtaaagcgtccgcatccacccctgtttcagaggcaagccgccgaagaacggcggtagccctgcccatgttgcgttcataattggcgccccattcctgctgaagggattgttccgcctgcatttccatctccatccgggcatcttccatgtgctcacgggcctcgtcatatgcctgggccattgtctcctgaagagcgttcattgcctccggcggtactccgtaacgataggccgtgcgggccatacgctctgccagcccggcattccattcgctttccggcgtggattcaggacgttccagacggtattcttcctccgactccggcaatccggccagccggcggaaccgcgccatctgttcttcattctccacaccgggataacgtcgcaggcgttccagctccgcgtaactcttcgccagagcctccggcgtcttaaacttggaaagagatttctccatccctttcaactcatcaaaccgggcgtaccaatccggagcaaaacctccgtcctcacccagaaggggaggaaaaggttcagtttgaactgcggtttcggacagcgcgtccgtctccggggaaacggccccggaaccctccgcatccctgataggagcggccatgctgttatcaatggaatcaatcatttttctcttcttctgtggtttctttaatggctaattgaagctggcggcggatgtacagaaagatctccctgtaggcatccctcctcatggcgtccagaggatcgtaattccccggacttccttgaaaaacgggcaaatcagtctggaaacgggcttccagaaaggaaagagtctcacgcccgtccggggtgtcaaacacccggagaagctggcgccttttgaaacgggcctcccggacggaggcctcctgctgcaatgtcgtatcctggttcatttctgaatcgcggttaactggtcaagcaagggattgagggaagcataaggatcctcttccgccggagccagggaggctccctgctggaggtccacccgttccttccgcatggcacggacatcggcccagggcctcagcatgctctccggggcgccgtccacacgggcggacaggcggaaacagtggtcccagtccacatgatccgccaaatccggggcagcctgcatcatcatattcagccgctgaaggctgcggtccatcccttcactctgcaagcgcctgagcaccagggcaatctttgactgatagacaaccctgggttctccgacggcaacggagccgtccctccctaccctcaataccgcacggggtggcctgggaaacttgcccatccggaacagcagggaaaaaatgcgtgtcattgtggaatacagatcactcacaaacagcgtgaaggaaggagaaaacatcaagacgcgctcattctcccgcgccatgacctccgtggcagtcatattgccgcggtgcccgctccaaagctccagcatgggcagataataggcacggcgtatcgcatcctgcttctgtgccagacggtccatcccgacatcatacctgccctgcgtagcccattcccggggaaggtgaagggaagcggcctccggggtaatgacggccctgccgccggcccgcaaatccacctccccaatctggttggcgagctccagaatacggggaaaggcggccacctcgccaagagtgtccagaatacggttcaggaactgcacctgctggatggcgggaaacaccagcctgccgggagccagaccgtacgggccgctgccccacttcaaaaagcgggttaccagataagggaactccatgtatcccccttcctccacaatcacctggtcgtccagagacaggtaaacgctttcaaacggcatgtgggaggcctgctccctgcggcggctgcgccgggtgcgcgggcgcaccacatgcagaaacctcagagttgtggcatacggattgcctccgcgctccagaacttcccgagccttgggccccagagctttcaccccgaacatggagcgtgcctgatgagccgtgtaggtaaactccctgacgtaggtatccacccggccttccgcattctccgcacaggcgaactgtccgcacggaatattggtaaacaacagccttccgtccgaggatgtgcccgtaaacagacttccgatccccaaagccacccgatccagaaaacactcatgaatctccgtataaaaattggaaacggacaattctttcagggcaatttccgaacactggttataccaggcctccgcctcgtcgcctccccggtcatccggagccgaccacttgaaccatacgtcatggctgggcgtaatataggacatatggccgctggccagcttctggcatgcctccacagccgtagtatccgtcatgcgattcatggcgtccctgttgggtagggaaacctccccttcccgattcaggcggcgaggcagcacgtaatccctcagacggtcccaccacgtttcccatggcgcgcgctgggcggccaaggacttgtacacggaattcaattccgcaactctttcttccatggcaacgcctatcccagagttttcctaagcagagtccgcggattgacctccccctgcccggcggaagaatgacggcgcgccagaatggtggaaatcattccctgcctctgccgttcccgggcctgataatcttcccctacttcttgttccacgctctccgccttgaccgggatggtctgctctggagcagaagcggaaggtgtggacggtttcataaatcccataatttcttttgctttctattcatggttgatactgattccccttcccttctgccggatataaggctccagaggatgccggacgcccgcctcacagacaatccatgcggcgggggcgtccttttcccatggaaggaaagggaactctccccacctgcccgggcaatccgggcaagtgcttacatttatcaaataaacaaatcggcaaaaaatgcacctgaggaaaaaccggacgcatacatgccattggtggcatcaaagaggtcgcctccaaacgtgatgcattccgcatccgtttcctccaaaacatagggcgctatgatcaatgaatccttacttcagccggatacgccatccgcgctggacatctgcaacgcggccctctccaaaataggggaggcacctctggacgcgctgattgccaatgaatccacggcatcccgcctttgcgttcttcattaccatccggctcgcagggaaaccctttgcatggcgcgctggaccttcgccgctacgcaaaccactctggactccgtttccgcacaggcgcccaattccctgaccccctatcaattcacgctgcccgcagactgcctgcgcgtgctggatgtggaatgctcggaatggaaaatgcagggacgccgcattcatgcttcctgcgccccgctgcccctaagctacattgccgatattgaaaacgccgaccaattcgatcccctcttcatggacgcactggccacccggctggcagaaaaactggccatgcccctgacgggcaaccaaagcctgcgccagaatcttaaccaggaattccataaaatcattcttccgcaggcggctaccgtcaatgcggtgcagtgcttttccaatgattcccacccgctgctggatttgctgagaaaaatcaaatcgccctcttgcccggaagaatgtgaataacatgagaataataagcaaataacataataataagttgtgaatacatactaatgaaagcactggatttcatacagatatttgcctccaacgtccgcaggctggactttcgcctcagcagtgcccaggtcatcctggccgtcattgccggatacaggcgccacagcaccattacggaagccacacgcctgcaccctaataccgtcaccaatatcctgcaggatctcattgcgcagggatatgtcaaccgtattggagacggtcgcccttatgtttaccggcccactgcggatggagaacagcttgccggaaacctgctggacaaaaatacattccccggcatatgaaaaatcccctgctcagtacggaagaaaaacgccgctggttggcccgcgttttccgggacgaggacggagaatactctcaggcggacaaattcaaggcgctggtggaagacaccaaactggcaaccctgcagcaggaagaggaggaattcaaacgccagcgggaaatgggcgccgaaccgcaggaccccatcctggctctgctccagtccctccccccggcagaactcaatctcaataatcacccctcttcctgacaacttaacaggatgatggaacaaaaaagctctctagaccaaacaagctcgaagagctttttcttttccagataagttacgtactccctggagagtacggcgggaggcatcttctcgaagcttgcactcgtcatgtttcagtccacgcactccttgcggagtgcgaccggcgccctccgtatctttctgcacccgcacctggtttcaatccacgcactccttgcggagtgcgacctggtgccttgccaattacggatgcacgttcgaggtttcaatccacgcactccttgcggagtgcgaccagcacaggctcatggtacccgctcaacaaagagtttcaatccacgcactccttgcggagtgcgaccatatccgttgcgggctgtgtcccggacattcgagtttcaatccacgcactccttgcggagtgcgaccatcttttcgcgggcgctggtggaggcatactcggtttcaatccacgcactccttgcggagtgcgacggaatcccaggccagcgtccagccgcatttctgcggtttcaatccacgcactccttgcggagtgcgaccaaaggaaatctacgtctttgacgagatgtaccagtttcaatccacgcactccttgcggagtgcgacgagttaatccggcatagaaagttggtgtggtgatgtttcaatccacgcactccttgcggagtgcgacatgatgaccacaattacattgttacacaaaaaatcgtttcaatccacgcactccttgcggagtgcgaccgagcatccccgtgatctgcctgtcccaggaagtgtttcaatccacgcactccttgcggagtgcgaccttgctctggcgcggctttccgacgtaggtattccgtttcaatccacgcactccttgcggagtgcgacgggtacatgtttgggaacggtcggagcgtaaacaggtttcaatccacgcactccttgcggagtgcgaccgtaaatagcatatagtttaaccaccccataaaatggtttcaatccacgcactccttgcggagtgcgacaagaaaaaggccatttggtgtcggtcatcctgctgtttcaatccacgcactccttgcggagtgcgacaggatgacgattttagcctcgccgcctttggcgaggtttcaatccacgcactccttgcggagtgcgacgttctaacgactggattcggaatacataagtgcaacgtttcaatccacgcactccttgcggagtgcgactctttgtctttttccattcattcaatataggaatgtttcaatccacgcactccttgcggagtgcgactcaatcatttacgtagtgaatgatgacaatgaagtttcaatccacgcactccttgcggagtgcgaccttcatcacttgttatcggtcaatcaatcgctatcgtttcaatccacgcactccttgcggagtgcgaccctggctctccggcggcgattgcctgattgcgcagtttcaatccacgcactccttgcggagtgcgactgcgcccgaccttatacattgctactcaacagagcaaatcatactttgcgccaacctccctaaaaagaccgtcattgcacggttgctctttctgagtatttatctgtcaatcttctattcccaatgcattacaccaatcgccgacctgccggggaattcgtgtgagcttgaggttggcgcacaggccatgttcaacagtctttaaataatcaagggaccgaagatgtcatagcttttctccttacccaattgttctattttatgatgccaattggaccccatatgataaattctgaggctgtcactctcgctatcaataatcttaagcagcttattcctaatgtcaaccaattgagcaggaggcaattcacattcaaatacggaattctgcactctctgtccgacattttcacaggctcgggcaacttgccgcaaccgccgctgcccggccttatcatccgtagctacatcatacgtaatgagaatatacatgacaacagctcgttttacttgccgatgaacggagtgtagcaatccagatccccacgcaaatggcgtgccaacaaaagggcctgaatatgaatcagcaatcccagggtggttttttcctgaagaaaaggatgcaccagaacggtctttttccgttcctgccaggcatttaatacttttttacgggaatcttccttcaaaaaaacggctccggattcttccttgtcaaaatcatctgaggatatctgcttgcggttaatcagggtaagggccaggcgatcggcaagaggagcccggaattcctccatcaggtccaaagccattccgggacgccccgggcggtcacggtgcagaaagcctgcggcggcatcaatgccggaactttcaagggcggacctggcgtcatggcacaacaaactgtatagaaaagataaaagagcattaaaacaatctttgggaggacgtctattgcggctttcaaacaccagctccggatcttccgtcctctggcaatgggacaagcaggaaaaataggtttccgctgcggaaccttcaatgccccgtaacatgtctccggaattgcatccacgggccatgctgcaaaaagccgccagacgatcgatcgcctccgacaaatctttcccgtatgttctttgcgcccttaaaagcagactgcggcaattcgcaattttggctcctatcatttcccgggcaacgccaacccatcttgcctcatcatcagcccagcggtattgctcccggcgcaacaggatatttcccttcatgaagccctgtacgccagccagaaatttaccgtaaggattgcaaaaggaaagcgtgatgccgcgttccgcacaggctcccatcaaataaggggaaactcctatgtcccatcccagcgtcacaataccctccaagttatggaggggaacccgcagcagacacgttccttccgcattgacttttacagtatcgccatccttggacagccagcatccttccagcgtcacaaacaatgtatttaaatgcttcttcataaatcatcggcttcacttgtttccaggctgtcttcaaacacactatccacccgggctttcatggtctgcctgtgctcccggcaaacgtcaggaagacagtcattgaccagggaacaggatttgcaggctttggaatacatgggcggcggcgtcacttccccggttaaaacctccctggcattcctgatagcctcggctgtcagaatacgcagctcttcatcaaataccacctccatccttttctgggtctttccataaaacagaaaaccggagggaatctccaacccaaacatttcttccaggcacaaggcctgggcgcacacctgcacttcatccgcacggtgcggtttgggcttgccaaccttgtactccacgggcgtcatggatacgggaatgccgcctttctcagcataaacaacctccacgacatccgcaatgccgtgaattccccattggagggaagaaatatgaagagaacgcaggatcctctttcgcccgcggttttccgtcatgccggaatccgcccgttcatgaaatacattcccctccgccgtaaattgattatcagcccacgcgcattccagatgaatcagtgcgcattgcctgggacaatacaagtaatgctgtaatgccgccaggggcactgaaaaaaaggaagaagacatcttggaaattctgttcagggtgaaacactaaataaaatactaaattaatcaattcatatattgcaaatgatcatatgaaacctatgatagtttcacatgtatcaggctcgcccccatcagtctctttccactcacgaacaagaatgtgcccgtacgatgtccaccctgcttgctcccttagggctatcgcaatttggagccttgatcggcggcatgcacgacttcggcaaaatgagtgcagactttcagcaatacatggatgctctctctcaacatatcagtcctccaattcccaaaggcggcatagaccattccactgctggagcccagtttgtgtggaattattttcccatcccggaggactctgaagaattttttatcttccggcaaatcattgctttatgtattgcctcccatcacaactctgctctcattgactgcttccgtggcacgatgcccggagatgacgtattctccaagcgcatggaaaaatccggagagaaaacccatcttgatgaaatcctgtccaaattgacgtttcaggagaaagagcattactactctctcctgaaaaaaacggaactggccacggaattcaagaatgtttacaccctccttaccacactgtttggccactgtccaaaaaaacaagcattccatgccggactaatcgcacggttctgcttgagcagccttatcgaagcggattacactagtgcttctggaaaaggaagctacgaaagcattccggaaccggattgggaaggaatgttaaaaaacttgaataaacatctcgaacaattcaaggctgatactcccatcaatcaaagccgggcagccatgtcgcaggagtgccttcaagctgcgccaggacgagttggcaagtggaaccttacacttcccaccggtgcaggcaaaaccctctcaagccttagatttgccctggaacatgcacggcggcaccatttgtcacgcatcatttacatcattccctatacctccattcttgaccaaacggccaatgccatccggaaagtacttggaaatgaatataaagactgcatcctggagcatcattccaatctggtgaaggaaacccttaacaaggagggagaaatggaaccatggtcaccggaaagaaaaacctggtacatggaagccactcaaacatggaacgttcccattgtactcactacatccgtccaatacttgaatgccttatatgcatccggcaaacagtatgtgcggcgcatgcactccctggcaaatgccgttgttatttttgacgaagtgcaagctattcccccaacctcactacggctttttgaacattcgctggattttctcgccggcatctgccacagcagcaccatccgctgtacggctactcctccggaaactgccacggaagacggaacgcacgctcatctcatcgaaacacctattattccggacagccaagcttacttcgatcaatttagccaattccgtcaatgcgaggttgtctgtgaacggaaaccctccaattactggactgtagaaaaaatgagggacttcatcatggagcaagcttcttccaaaagccccaccctcgtcatcgtaaacaccaaaaaactggcctccaaactggcctgcgcctgccaagacctgaatacagaggcggacgttttccacctcagcaccaatatgtgccctgcccacaggaaagaaatcatcacgaaccgtattgacaaaaaatctctggaaaaggccagaaggaagggaaaagccgttgtgtgcatcagtaccggcctcattgaggccggagtggacgtagactttgacgtaatcatacggagcgtggccggcctggattcctgcactcaggcggcaggccgatgcaacagggacgccaaccgttccgggggaagagttatcctgattaatcccgcaggcaatctggaaagactggattttctaccggaacttgaaatcggaagggaaattgctatgggaatgatttgtgatcctgaagaaggaggaattctgggaaataaatccgtttcgctctattttaaggaattctacggcaagctcacccgctctcataatcatgatcatctatcctacccgtttatatgctccaacgtcgccaccaacatggaggatgcgctatctcaaaatttcaaactgatgacacatccccgtcagcagtccaaatatgctcccctccgtcttttccaggcctttgattcggcagcacgccaatatcatccaatcaaggatgatacaatagctgttatcaccccttatggaagaggggaagaatgcagggaaaagctttggaatatgaatcctcatacggatgaagaatgggaacaatggaatgaatggctccaaaaagccagagcctattccgtcgcgatttccagccaacttcttgaaaaatacttgaattcgggagacattatgcgtatacaggaaggagtggatatttatacaacaatacctaataaatatgatccatttctgggctttctcacagatcccggagagacttccggtgcgctgaccgtttcccggatttaaaaatttcaacagctttatattcatgcttaatcaaatcgaatttaaggtctacgggaaatatgcgcttttctccgaccctctcacccggataggcggagaaaaatgttcttatcaaattcccacttatgaagccctgaaaggaattgtaaaggcggtgtactggaaacccaccctgatctggttaattgacgaggtgagaataatgcgccctatccgtctggttcccaaaaatatgaaactgatcaaatatcatgaagccggggcggatttatccgtatatacctaccttcaagatgtggaatatcaagtaaaggctcattttgaatggaacatgtaccgtccggatatgtccaaggaccggatcgacggcaagcattatgaaattgcccggcgcatgattgaccgcggaggacgtagggacatcgcgttgggaaccagggaatgccagggatacgtggaaccatgccggtttggagaaggaaagggattctatgatcaatatggagacacctcctttggactcatgttccatggtttcaattatccggatgaaacgggaaaagaggagctctccatacgtttttggcgtccggtcatggaaaatggaaagatccgcttcgtgcgccctgaagcatgcgaaattgtcaagcatgtacgccccatggcggcatgcccgccaagatccagcggactgaatgatctgagcctgggagaatgaaaggaaaaagaaaacgatgaactggatgtacgccttatacgccacctatgaacaaaaccgtgattatgtgggtcgtattgacaaagaaccggcccacggcaacaggaaagaacgcctcattacccctcttctgccgctgtaccacagcatgcagaatgctcacatcaccatcacattgaacagacagggagagctaattgatgcatccctcaacaatcagaacagtcaacccaccattatccccgttacggaagcctcaggaggacgcaccagcggagcctgtgcccaccctttgtgtgacaagctccaatacgtggcaggtgataacgctgactatttccctccggaaaaatccccggccaaacggaccaaacaactcaaaaccctgcaggcatcctacgaacaatatgaacagcaattatcggaatgggcggcgtttgaccccgggaatgtcaaactgaacgccgttctggcctatattcgtaagaaatccctgatcagggacttgatcaagaaggaaatcttacatgtggaagattccaccaacactctgcttcctgtatggaaaggggataaacaggaaatgcccgctatctttgaatttctgggagcgtccacccaggaaaatgcgttcataagatggaagatcaacaacaaggatggaaaccctccggaagtgtatgaagaccccgccatgtacgaatcctggcgaatttatacggaatccaaggccaacaaagaagggatgtgctatgtcctgggaaaaacagcacctctggcaaccactcacccggcacgcatcagaaacgcaggagacaaggctaaactcatttcttccaatgacagttccggctatacctaccgcggcagattcattgaagcggatgaagcgtgcggagtaagtacggaagtcacccaaaaagcccacagcgcgcttcgctggcttatctcccgccaaggctggtatgatggagatcttgtcgttcttgcctggtctcccggtctgttgaaagttccgtctccctgcggcaatgtgcaggaatgggaacactacacgcccgaccagccaacaccgaatgaccaggtcacccaattggttaagcaatttaaaaaagaactctccggaggaggaaaagagctgctgcggacatcattgaatgaaaacgatattaaaaaccgtgttcttgttctcagcttgaattctgcgtcgccggggcgcatgtccctctccagctttcaggaatttaccgtctccgaataccttaacaacctgctttcctggcactccaaagccagttggaaacagcaccttcctaaagacaaggaaggaaacgaccgatcttatattggcgcgccgtctatctccatgattgtcaaagcagcgtatggaataaaggtagacgataaactacgcaaacacgccctctccagactactaccctgtattctttacaatctacccatccctccggatctggaaaagcaatgcgtcatccaggcatccaaacggcatgccatggaatggtgggaatgggaaatgaccttgggagtatcctgttccgtttatctttataaccatccacaaacaaatacttcgtcctcagataccatgagccttgatccaaaaatcacagatcgcagttaccttttcggccgtcttttagccgttgcagaagccatcgaaacatcagcgttaaatatcacgaaaacctcccgccccaccaatgcggaaaaacttatgcagcggttccagcaaagaccgtcagaaacatgatccatgctggaaaaaagcattcagccctatcgcaacattttgaaaaaaaatgaaaacaccgtttctttcttgagaagctatgatgcttacatagacaatatcatggaaacattcctcatgggacaattcatggataacgggccattaaccggagcctacctcctcggttaccactgccagagagcctttatttacaaaactaaagaagaaaaaaatgctgaactggcaaaataaatcttagaataaaacattaattcaacactataaaaccacatcatgagccttaatcataaaatcgactttgccgtcatctttaccgttacgaacgctaatcccaacggagaccctctcgatggcaaccggcccagaaccaccttggaaggactcggagaaatctccgatgtctgtcttaaaagaaaaatccgcaataaactgatggacatgggacaaaacatctttgtccagtcagacgacagacgtgtagacgactataaaacattgaaagaacgagctactcccatcctgaagcaaaaaggtacgtctgctgaactggcacaaaaagcctgtcaggaatggtatgatgtgagagcttttggacaggtctttgccttaaaagacaaagatgcggcaaaaggcaccggcgtctccataggaatcagaggcccagtcaccattcaaccagcctttagcaaagatacggtgaatatcactagtacacaaattacgaaaagtgtcagcaatgacggagacggcagcaaaaaatcttccgacaccatgggcatgaagcaccgggtggacaagggaacctatgtcttctttggagcaatcaatccacagctggcagaactcacaggcttctcggatgaagatgcctccattttcaaacaagtgcttcctcagatgtttgaaggagacgcctcctctgctcgaccggaaggcagcatgtctattcaaaaagtcatttggtgggagcataactgtaaaagtggtcaatactcttctgcgaaagtccaccactccattgaaatctccgaggatggaaatattgtaaagaaatatgatctaccgggattaaccccggaaatgattgaaggcttctgagctgtttcttttcacgaatgtcaaaacacccttcactaaaaatgaagggtgtttttaatgagcgttatagccaaatgctccttctcgttctagggatattaggccgttcaatctacgacatctaaatccacgcactcatgagagtgcgaccctgatgcgcattgcggaaaggagccggaaaaaggtttcaatccacgcactcatgagagtgcgacgccgatgcaccacgtgccgggtacgttgttggtcgtttcaatccacgcactcatgagagtgcgacatattgcgtagttcatttttatcaatttatcggtgtttcaatccacgcactcatgagagtgcgactaccggaaagttagcagggccagtaatagcggaagtttcaatccacgcactcatgagagtgcgacaggagtttggggtgagtccgatccgcgaggagaggtttcaatccacgcactcatgagagtgcgacctcaaatccttccctttcatactcactccctccagtttcaatccacgcactcatgagagtgcgacccggctggttgacgggaaccctcaacacttagccgtttcaatccacgcactcatgagagtgcgacgcttcgccgccgggcttgtcaaagtcggctggttgtttcaatccacgcactcatgagagtgcgactatatatttttgtatccataaaacagttttgtaagtttcaatccacgcactcatgagagtgcgacgtcaacgcggatgactttaacatcatttccccggacgtttcaatccacgcactcatgagagtgcgacccggggcggctatggcactgattatcaacagtgcaacgggcgttttgcgccaacctcccatgggaggtacaaagactccaggccttaaaaagagatgatagttgtcaagatcagaaccccaacggattacgaaaatcgccggtattccggaaatttcctgtgagcttggggtcggcggaaggaagaccgggagagaagcttttcatgcgttaaaaagcctgcatctccggcaaccaaggcctgtgcacgatgcggaaatatcctagcctgttccctctttcccgtccagaattttgtaggcctctccccggaaaccgttttattctcttttccacaaaagaagaggagccccgggatagccgtggtcccgaagcgccctgcggaaaatatccgcggtttacatgatgcttttgcgcgtccacctgttcaggctcaacagccataccaacgccgcggaaacagcggaggccagacaggccatcaacggaattttcacggcggagggcagccctcccagcccgatgaagttcacgaagtcataggagcactggacaaagaagaagtggcacagatacacgccgaaagtaagcgccgccaccttgctcagcactggaccagccttgattctgagccggctgacgacagcaaagatggcaaaggtcatcagaaatacattgattccggagaaataccaaagcacttccagcttggaatactggccggggaagtgcttctgcgtttccagaaagccgaagaatgtaacggcaaaaccaatcaaaaagaggggaatagtaatggacagcatttttttccagctccaggccagcgggtatttggtcaggtaatgcgccagcaccatgtatcccaggaatccggaaaagttataaaacataccgtacggattccaatcgcaaacacccagaatacccatgttgccgtaattgccctcataacccagtgccggggcaagcatctggatgtaggggagagtcatgctgaatatccagatgcccaggaagattttcacatctttcctcctggcttgcgccagccacgcgctcatgatgggcatgaaaaggtacaggcccaccagcatgtatacataccacaggggcgtggtatcatagttgaagttgaagaaaaaggtatacagcttgccgacggtggcactccaggtataagtgtccatcacgatgttggggctgtccgtttgaacgcctgcggcaaagtatccgaagtagagcaagggaagcgccagtgaccagacaatgagcggaaccagcaccctcttgaggcgcctggagtaaaaagcgcccatttccaaggtgacgggaaagagcaacactccggagatcatggcaaacaaaggcacgcacggccgtaccagacttccccagaagacagcggatttaaagttgaaggaaccgtcaaaactgccaacgaacggatcacagcaatgggccaggacaacgaggaagcaggccaggatacgcagaaagtccgcccaagcgatgtggctaccgagggagttcaatgattggttggcgttcatggttatacaatagaaaatacagtaggaaaaagagctgcgtcatcgctcacatttctgaaaagaaacttgttctcagggaatgttctatcatgaaattcaaaaataaaaaatcataatatcccattttgacaaacgggaaaagatatttgagaagacccacgctccctgtagattcccacatctcttttcccataaggagcaggaaaaattttaccacagactccggaatttctcactatgacatctgttagcatttttgggtctgcgtcagatttgctagtaaacatagcctgtaaaatacccctgtcagcaggctgtcgggggtgaacatcccttgcatcatgtgttcgcatacaagggaggaactgtgaggaacttcactttgtcttctgatcgcgtggatgtcgagcttgcaatggacagaagatacaaaaattcctgcccaagtgtcataatcatatgataactcattcttacagagttttttccattcaaaattcacctctctgtattttcaatctttctgctcttattttatatgcttttgaatatctatatcgatattgaggtgatttcgaatgataaaggccttcgattgggtatccggttatggattgtatgatggaatccgtaatccagtaccatgagagcatggagactataacgataagagcgtaagcaattgttttagaaggtgagtctaaaatatatgattgtttagctcttttcaatgcctgaaaactaaaagggataatgtagaaaattcctagtgatgagctgaaagctaaaataaggctttgaatgattaaatcataataactgagcgcctctttatctgccggaaaggcatatataatagtaagaattgtagttgtgataattattcttaaaactttatatgtaaatgtattgacacttggtgatgcttcattatttttcagattttgcatttctaatttcttcggcgatgcattcatcgtcttcggcagtgagttcgatgttttatgtttttatttataatgattttctgtagatttcgattccgtcagttggatggttttttaattttgcatcagatttgctggtaaaaataacctataaaataccctaacaactcgcaggggcattaccttcatttgatgaccaagatacctgaaaaacgggatttacgccttcttcttcacgcgcggttcgctttgaaactaccaggcggaggaataagattgccgtagcggtgaacggtttcggaaacagcctgttcccggaaataccccagcagttccaaccgcccattggcaagcacgggacgattcaatacttccacatcccgggcatgggcggcattgaccagagcctcggaaatatctgttccacgcaggaaccgtacgccttgaagggcttccggcatccggccgatcaattccgcttccgtttccaccgtcagggaagcatagtaaccatgcattttctgaatccaggggcggcttgcccctatgctcaggtgcaggagcaccccgcacagtttcgcccccagcagcagaatggcgacgtcatcgtcggacatgttttccacacgggccagaattcccttcaccggggtatagcggaagatattattttctccgtaaacacgggagggatcatggttcacgccgaattcctccatccaccacttggcctgggaaccagccgcggaacggatgcgcttggcgcagtccggcagctcggaacacagtttttccaccagtccggagatacgttcacccggcgtgcgcagcttttggggcagcgccttttcctcccaacttcccagcatggtaaggtagttgggacctccagccttggctccaggccccatggaggaatggttccacccgccgaacggctggcggcggacaatggcgccggtgatgacacggttgatgtacgcgttgcccacctgcactttagttttccacaaggcaatttcccgttcatccagggactgaaggccgccggtaaggccaaattcggaatcgttctggatgtcaatggcttcctccaggttttccgcacggatgattcccaataccggaccgaagcattccgtctgatggaaccagcttcccggtttcacccccagccggatgccgggagaccagaggcacgggttgtcttccgaaggttccggcttgagcagccattcctccccgggttccagctgcgtcagcgcacggagcagattcccttccggctccctgatgagcggcgtcaccacggagttgacttcccaggatccgcctaccttcaggctggcggcggcatccttcaactgacgcaaaaaggcgggattgtcataaacggaagcctccacaatagccacgctggcggcggaacacttctgtccggaatgaccgaaagcgcttttcaccaaatcctttacagcctggtccggatcagccgtagcagtaatgatcatggcatcctttccgctggtctcagccagaacatgcaggtcaggccgcagttcgcgcagcatttttccggtgcggtaggatcccgtcatgatcacgccgttcaatcggggatccatcaaaaacttgcgggaaatttcattgcgcggcatcggcacgaattgaaggacgtttttaggcacaccggcacgccagaacgcctggacaatctgccaagccgtataaacggccagttcggacggtttgaacaccacggcatttcccgccatcagggcggcagctacaccgcccgtcggaatggcgaaggggaaattccagggagacatcacgcaaatggtacccagcggggacatttccacgccgtcgttcattccgtcgcggttcaggccttccgcgtaatagcggcagaagtctatggcctcgctcacctctacatcagcctccgtgggagctttcccggcatccctcaccatggcagcaatggcttcccccctgattctggacagctcctgcgccgcccggtgcaggatttcagcgcgttcgccaatgcttttggacgcccaggaggagcgggccctgtccgccgtgaccaaggcatgttcaacctggtcaaaatccgcataagcgaatttataggaaacttcattatggcgggacggatcgcgccccacgccccatagattagtcgtaatttcctcaccatctataaccagagggatttcctcgccggatttttccttctccgcggcaatcagcccgttgatccattccgcattctgccgcagggaccagtccgtatcccgctcgttggcaaaggcatcccggtaatgtgagggctggatgggatccgcagcgcggttctgcgtgcggttggggccgtacttcacctcatccttttcctgacaggccttcaaaaacctctttttctggacctcccagctccgggaccccggtgtcatgccgaagagatcatgcaggaagttctcctcactggtattttcatccagtctccggatcaggtaggcaatagcgctgtgaaaatcttccttcaaaaccacaggggcataaaggagcagaccgtccgccgcctggcggatgacccgcgcctgatggttcgccatcccttccagcatttcgaattccacctggtcacgcacgccttcccgctcacgcagcagcatggcataacacaaatcaaacaggttgtgggaagctacgccgaactgcacatatctggcattatccggcatgcagccgtaatggagcattctcttgtaattggcatccacctgggctttcgtgccatacggggcctgcgcccagccatgcatggaggcctccaccttctccatcgccaggttggcgcctttcaccaggcgtattttgatgcgcgcccccccctgctccacacgttccttcgcccaggcgcacagcttcatctgctcctcccaggaatccggcaaataggcctggagcacaatccccgcctccagctgcatgaattcatcctccatcaacgtacgtttgaacgcttccgccgtcagatgaagatcacggtattcctccatatccagattcacgaacttgggctttctggaaccgtccggcaacgttaccgcattggtaatggccgcccggtacaggatgcgcaggcgctcctgaatcaatttgacggtttcttcaaaggctaccagatgaatctggctgaaaatggctgaaatcttgacggaaatatagtcacagtccttgtctgtcagccgatccacgacctgctgaagacggtggtgcgcctcgctttcacccagaatggcctctcccagctggttgatgttcatccggatgccgcccttgcgcctgcggcgcaggtgggggcgcagttttccatcctcggcaggaagaattacattggagctctcctttctcaactggctggtaatcatgggcatgaccacacccggaaattgagcggaaaacctcccccccattttcatggcgaaacggtccgccgcagacaaataacggggaacgccatatccgtccaaaagatagcggaacaactcagcaccccgcgccggagaagaaggacggaacacacgatccgccagtgccagcgtaaacgccttgcccgccggatcattcatcatgcgctccatttgctgcgcctgcctcttctctttccctctcatcccggcattcgactgctttaaaatgaactccgccagttccacagccttggcggccagttgctggtcagtccattggcctcggcgagcctccgccatcatgtccgggatggatgaatctgtcataacggttcgaagactagccccgggcaggggcaaaatcaagccaatttgcccgggccttcctgtggaaagaggaatcacggaggaaaacgcatcccttgattccgtgacggaagcaggggggccttcctgtccatttccggcaactcaggaaaggacacattaatcataccgcgcagccgccagacgggctcttctcagctcttccctgagctggtgcgcccgtctgccgcaaacgctggaacggttcatgtccctgacctcttccaaaaccgcaaccgcctggttgaaggcatcctcgctttccggagtgtgggcttcccggtacagaacctcttccagccgcacccagaggggatgcaccatggagagcagaattaactggcgctcctccacggataacgagggatcatccgcgcaggcacgccacgcttccagacatgttcgtatggaagaagctttgcaagcccggaaagactcgccaagcaattcggccgttttcctgtttttctccagacgaaaggccgcctcccgggcgttaagaaaagccggaaccgtacagttcaatttttccagacgcttcatggtgccaggataatcccgaaaccaagcctccggaggcacctgttccagctcccggcaaatggcggaggcttctgccgcaggatccccgccctgcggaatatcattcacccgcgtcaccggccgcacgcgctgcgctttttccgcaagcagggacactttttcccgcagagaagctgcagaggcccctccttccaccaggtcgaacacacgtcctttggagtcaagaaaaaccacggaaggcagcatgcgcacaccatgcatcgccgcacgggacaggctgccgttttcttcccaatccttcacggagggatgtctgggaaccgtgacaaactgcacgtcacgcacatattcatccagcgcgcggcgttcttccgtgcccggctggagcactttcaaccaacgggcttccgctgaaccgggttcctctgaaccgtacacaaccagaacaggggatggaagggagggagccgcagaacaggagacggaaagggcatccatttccgcacgtcccggaaacgccagagccaaaaatgcaatgaccgctaaagtcctcatgaataaactgccatccatcagccctttctgatggtaatgcgcttgtaacggctgtccccttcttcggactccgttacaattccttccatggactgaagggcattatgcaccaggcggcggtggtaggcattcaacggaggcatcttcatcggttttccgctctcctggacgcgttcggccagggaacgggccttttccagcaaacgggcttcgttgcgctcccggtaatggtcgcaatccaccttcacgcggggagcatcctccatcttgcgctggatcatgcggttgaccagatactgaaggtcatccagcctgtccccgtcacccccaatgatgtactgtgaatccggggaggaaatgttcaggcacacgatgccgtccgtttccgttacttcgatatccgcggaaaaccccagcgaagccagaaggctcttcaaactctgttcagctatttcttgcaccgtcattactttaaattaataggaaaagggttccataccggaaaaaccgcctcgcgccggacggtgcgagccttttctccaatacccgattgacataaaaatcataacctatttattcccctcgtctatgaaaatttgtggaagctccgttccatatcatgtacgcaatgccgtccctgccctgccgttccggcaaaacggttccgttcctccttcggaatcagatgcaggaaacaccgcttaacaaggaggccactgttttccgcctgcccgcggctgtaccccggttatctccgcttcttcctgccgcaaatgaaacacaggctgcaggcatcacagccatgccaatcaaacaggcatttcctcacagcccgttctttattacataaaatattaaccaccagtttttataaaaatttttcatccgctccggagaaacactgatgacaaaacaggacggaacatccccggaaaaagggaagtcgaactattacccacatagaaaaatccgatccctcatgaacaagccaatgaaaaaaaagaaaccgcccatggaagacagcgccgccccttttcccaacggaaaagaagctgctccccattatacggatacaattgatccggaattgatcaaacccactccaaaacctacgccgcccaatgcggaaccttccgcgcccggttccatgaagatgccggataacgctacggaaaaaatcagggagctggatgccatgcgctccaacggcatgggacaggccctcacaagcaacctgggagttaaaatatccgatgatcaaaacacacttaaagcaggaagcagaggcccctctctgcttgaagacttccactttctggagaaaatggctcattttgaccaggagcggataccggaacgcgtggttcacgcaagaggttccggggcacatggttattttcaggtgtacaaatccctttccaagtacaccaaagcggcttttttgcaggatccgggagaaaaaaccccggtctttgtgcgtttttccaccgtgcagggcttcagaggatctccggatacagtaagggatatccgcggttgggctaccaaattctataccaaggaaggcaactatgatctggtaggcaataacacgcccgtcttcttcattcaggatgccatcaaatttccggatttcgtccatgccgtcaaaccggaaccccacaatgaaatgcctcaagggcaaacggcccatgactccttctgggacttcgtctccctgcagccggaaactctgcacaacgtcatgtgggccatgtcggaccgcggcatccccagaagcttccgtacgatggaagggtttggcatccatacgtacaaactgatcaatgaagatggaaaaagcactttcgtccgtttccactggaaaccgctgtacgggaaaaaatccctggtgtgggatgaagcccaggtattgacaggacgcgatcctgacttccaccgcaaggatctctggcaatccattgaagccggagattatccggaatacgagctggggctgcaactcattccggaagaagacgcagaccaattcgacttcgatattctggacgctaccaagctcattccggaagcactggttcccgtggaaatcgtcgggaaaatggtgctgaaccgcaacccggacaacttttttgcggaaacggaacaggcagccttctgccccgccaatatcgtgccgggcattgatttttccgatgatccgctgctccagggccgtattttctcttacagcgatacccagcggcaccggctgggaggagccaacttcacggaaattcccatcaaccgccccatttgccccttccacaataaccagagggacggcttccaccgcatgcagatagacacctcaccggccaactatgatcccaattccatcgggaacaactggccgagagaaacgcctccggagaaaggcggcttcaccaccagcccccagacggtaagcggcgtcaaggaacgtttgcggagcccctccttcgcggaatactattcccacccccggctgttctggatgagtcaaactccggtggaacaggagcacattatcaacgctttcagctttgagctgggtaaggtgacgcgcccctatatccgggaacgcgtggtggaccttctgacacgcattgatccggacctggcaagcggagtggctcgcaacctgggaattcaactcaccagggagcaactcagcagggaacttcccaggcccgtctgcggcctggaacaagatccgtcattgagcctgtatgcccatacggacggcaacctcaaaggccttcgcgtctctttactggcagcggacggcgtcagcctgaaatccgtgaaagaaatctgcgatgccctgcatgaagaaggcatccacccccaaatcatcgccccgcacatgggaagcataacaacggaagaaggggaagagctgtttgttgacggaaccctgtccggcactccttccgtcctgtttgactccgtcatagtcccggaaggggaacaaagcctcacaacgctcctgaaagacggagatgccaagtaccatttgcgccaggcctacaggcacctgaaggccatcggactgcccggcaacgccaaagccatgcttgaggcagcctccctgccccaggatacggatgacgccgggctgctcatgccgaaggacaccaagtccctgatgccccccttcatcacggccatgaaacagcaccgcgtctggagccgagaacctaaaacccttgatttcggagcctaaattcgtttcttatacaggaaccgcttccatttacgggctgccccgccgaaaggtgcggcagccgtttttcactaaaaaatccgggggagttaaacaacacttcgggcaaattgaaaaagggagggagatacactcaaaacgggaacggaaaccggaatacagcatgatgataatgccttcttaaaagaaaaccccgcaagcctttaaacttgcagggtttattaatggtacacggagagggattcgaacccccgaccaactgtgtgtaagacagccgctctaccactgagctatccgtgcgtgaggtggaaggaatatataccgggaaagcaggcccggcaaggagaaaatgaaaaaaatgcgtcctcatttccctgttctccatgactgtaaaatccggacaccgcaaattccagaaaatggaaagaaggcagacaaggatttcctgtccctttccgggaatatgtttccgtattatttccggaacctgttcccctacctgacatctacgcgccggagcgcgcggtaatgcaggataatgaagagaacgcacaatacggcttcgaaccaatagaacatgtctaacgcatcccgaccggaagtgaaaccgtaggaatgcagccctactccaagcatgttgacgccccaccaggcaaaggcaatgataacgccgcccactacattgctgaagtggagcagccaggaagacagccatccggctttccggacatgcaatacggtcaattgccacagtacaatcatcaatgctccgttttccttgggatcccagccccagaaccgcccccaggattcattgccccaaatccccccaaaaaccgtccccaccagcgtaaacaccagggaaaaacacaagatgccgtaagccatgcggtccagggattgttccgtttttccactgatcaggcacaggggggaagccagcaggtatatatgggagagcaccgccgccagcagcccggccgcataccccagcacaatggtaatgacatgggtggaaagcaggaagttggagcgcaggatggccaccaggggatccatatggtgcacagcctgggaggcttcatacagaatacccatctgacaggagaaagccccaagcaaaagccccgccgccagtacgattccctttttactgaaaagttccaccacaagagcgcagagcactcccatgcaggcgatgaaggcaatggtttcatacgtgttgcccaccggggacctcatggtaatgagcatgcggatgaccagcgccgcggccagtactccggttccgcccgcgcctgtcagccacgccaggctgaaacctccgggccgaagaaaacgccgccagaggggagcgttggcggcagggcggaaaagcgcacagagcagcaggcacacgaacgccgccacaaaaacggccagggaaatataaagcggatccagacggtagtagaaaatttctctttccaggctgtgccgctctccggcggaggcggcttcattgggttgcgccagcttttccagcagcaggccttccgctttcatccgcagtgcggaagcctccgccccttccataccgatagctttgcgttccagcagggacgccattgccaaaaaggctccggcaactttatccggggcagccgtccacaggcgttctccatcgcggccggcagaaggaaaccagcgtgggaattccatccgttccatggcggaagggttttccagcatgatccgggagacaagcatccatccccgcattacgtcaaagttgcgggcaagggacaaaatttccttctgggcttccgtcagattcgtttctcccagcaaacggatttcccggacggcacgggtcatttcctcccagcgttccgcaagctgcgcgtaggagtattttttacgcttgtctttctgatccggcagatgcaggcgcctgaccacctcttcccgattgaccaggaaaacagggtattgttccgccagttccggacggaacatgcagtccagcatccattccaccggggaaagcttccttttcccttccggcgtatcaacaacaaagcttcttttgcccagcgtccggagcagatggaaccccgcataagtagaaaccggcttcaggcggccgccgtcctggacggccatggccccggcccgttccaccaaagcgggagaccagggcacataatttttcaccagaacaggatgggcggcaggacgcgctgccagcatgccgacgccgaagattgccgctaccagcaggcaaatgcctgccagacgcaaatgttttttcccgccggggacggaagcggcctgcggttcaaccgtcgccgccgttccggcagatgccagaccgggtttgcggcgcaggtatctgccaaaaacacaggcaaaatgccacagcaatcctaaagcgatgatgtaggaggaccatttgggcatttgctccaggggattatgggaagcgcggagaatggagatgagcctgcccggatgcagggaatcctggccccagctcatctggtacagcgtccagccggaaaggcgcagaggctcgttcatgcggataacggcgtcatattgaccgccggattccggaaaaacggttatctgggattcataggatttaggcttggaagtccccggataaaactccggcacaaaacggttcaggcgcaaatcaaacggaagggaatattcatgcacccggtccccttggggcagttccacctgttccacggccaccgtcattttgttgcccagcatgatgccggccagcagcagcaaaattcccccatgagccaccagcacgcccgcgtgcctccaggtccaccggatgcggaataccccgcctatgagcaggttggcgaacagcaggacacaggtaatgcccatgccgggcaaaggcagggaaatcagggagttctccccgcccagcggtatcagcacataagccgccccgaaaaaagactctatggcagcctccgaccccatggcagaagacagccgcacctggtgcagcgtcccggcaaaggtcagcaccagaaggatcagcatcagggcaatgcccaagccgtagcttccggcaaaattccagaggctgcgtccatattttttccataccgcatccgttcgttccctgtccatcagcgtaaggcatccgtagtctaaaaagagggccgattgcacgatcagctcgtgaaaccggccccaatcatattcctggggaaaaggttattaaaagttgtccgccagttcttcaaagaatgcctggggatgtgcacaagccggacataccttgggggcagtggaaccggtatgtacataaccgcagttgcggcacttccattggatttccttctccttggcaaaaaccctgccttcgcgcacattttcagccagcctgaggtagcgggcttcatggtgctgctccacggaggcaatcttgcggaaagtttccgcaatggcggggaagccttccctgtccgctacttcggcaaacgcaggatacatgtcagaccattcgtcatgctcgccggcggctgcggccagcagacaatcctccgtagattccaggggagccgtgcagacggcgtgcgttacttcaacgcaagcgtctttcagcagtttgaaaaataccttggcatgttccttctcattgtcggccgtttccagaaagatagcggcaatctgttcgtaaccggccttcttggctacgccggcaaagtaggtgtagcggttgcgcgcttctgactccccggcaaaagccttgagaagattcttttctgtttctgttcctttgatggatttcataaattagtcatctggttgcgtaagcgaaagcatcctaataagacgccgtgaaaaaacaagcaaatattgaatgaatctaaaaaatagacatatccggaaaaacatacggcagtttccccatttgggaaaactgttgccatgcacgcttctgctgtccccccatacgcgccggcagcaaaacggcatcccgcgaaacaggcaggaacccgtaccgcaacatcaggcctaagcatgaaccggatcatttgacaccccttgtgcaaatagtaaaattaaacggaaaaaaaccttaagctccatccatgaattccgccaatacccccttattggaaaccgagagattaatactgagaaaattcacggaaaatgatctggaggccctgttcaacatttacagcaatgaagaggtaaacacgtatttgccgtggtttccattaacctccctggaagaagcggcgtccctgttcaaagaaaagtaccaggaagtgtacaaacggccttacgggtatcattacgccatctgcccgaaaaacagcaaccttccggcagggtatatccacgcaggcacggacgacagccatgacctcggctacggattgcttcaggagttctggcacagaggctttgccacggaggcggccagggctgttgtcgcccggttgaagaaagacggcatgccctacatcacggccacacacgatatcaggaatccccgcagcggaggcgtcatgaaacagctgggcatgcgctaccaatattcttatgaagagctgtggcaacctaaaaatattctggtcactttccgcatgtaccagttgaatctggatggacaggaggatcgggtttatcaggaatactggaacaggtcatccgtccgtttcaaagaaactggtatttgaattcccaatacccggcctcatcttctagagttccttcccgccctgggaaacattgcggatacctccgcatccggtcacctttccaccggttttccggagaaagtcctgctccacggttcttccagcctgtccggaactctttccaactcccggagtattttctcccgctcccgggaaatccgctcctgatccgcagaggccggaacaggctgctccccgggcagaggcatcagcccgtccgccatcctgccaccgtccggggcaaccggcggagcaacacccttgttgtcttcatccgtttccggttcaggactacccggcttctgctcttccatctttccggaactttccggaacagccagattccgatacaggaacaccaggtcccccgcctccacagcgccgctgcggatatccgcaggaatgcgcgcacgccccatccgctcctccgtcacaatcaggttggcgactctgcatttttcctcccggcccggagattgggagataagcacgattcccggttcataaacattcccggccagagcaatcagcacataatgatgattgggatacacctgctccaccttgcccacatatacggggggaggggctgcttttttaacgggctgctgcacctgctgggaacaggaagcgcccagcactacaaacgccgccagaacaggcagggaaacaattcgtctcatggtgagttttttcgtcgtttcattccaccagcaccttgcgtggacggttggtattatccgccggggcaataatgccgcgggattccagcaaatccatcatgcgcgctgcacggccgtatccaatgctcaaacgacgctgcagcagggaggtgcttaccttacgttctacaacagccacttccaggcacttggcatagcactcctcctccgcgtcatccagcggactgtccgcacctccgcgggaaggctcgtccaaggacttctgaacctcttcatggaatttctgcttggcctgggaagcacagtgggccaccagggcttccacttcatcgtcagagataaaggctccctgcgcccgctccacctgggcggaacccggcggcaaatacagaaggtctcccttgcccaccagtttctccgccccctgcctgtccaaaatcacacggctatccgtaccgctcgccacctggaaagcgatgcgcgtcgggatattggccttgatcgtccccgtcaccacctgccttctgggcgtctgcgtcgccacaataaggtggatgcctgcggcacgggccttttgggtaagacgtccgatattcgtttctatgtccgctcctactgtctgcatcaggtccgcaagttcgtcaataataatgacgatgtaggggaagcgttcagggataactccgtcgtcctccagctccagttcatcatcttcttccacaggccattccccctgggattccaggtctctggcaatggattccgccaaagcttcatccacctgcccgtcttccggttcctccgtctcttgcgcaggaacatccggcgggcgcttgttgaaagcttcaaagtttcgcacacccaccttggcaaagcaatggtagcggtgctccatttcatttacgcaccaacgcagggcattgggaaccttcttgggatccgtcaccaccggaacaatcagatgcggcagcttggaataaggctgcatttccaccactttcggatccaccagaataagcctcagttcatccggacggaatttcaggagcatggaggaaatgatgctgttgatgcacacggatttcccggatccggtggcaccggccaccaacaggtgcggcatggatgccaagtccccgatcacggtgcgtccatacacgtctttccccagcgccagcggaatctttttcttgggggaacaaaaagcaggatcctgcaaaagttcccgcaggggaacggccaccttcttccggttgacgatttcaatacctaccgtatccttgcccggaatgggggccacgatgttcacgctttccgccttggtcgccagcgcaatatccttcgcatactggtcaaaagtatttacacgcacgccgcgcgcgggatacacttcataacgggtgatggtcgggcctcgggtaatatccccaggcgtcacgtccacgcggaatgtcgtcagggtatcaataatcttctgctgtatttccagcatttcttccttgtcctctgccgtagggccttccggcttttcttcataatgcagcagttcaaagggaggcagctcatactcgcggaattcctccgtgggcggagtggacaatttggaaaaaggctgctctttaggcgcaggcttcatttccgccggttccgcaacggtaatcctggggcgcggagccaggggaaggcggccctgggtgcgcggggcgctgggaggcgggacagaatcctccggcttggacggagcaaccgccgccgcttcatgatacaaactttccagatcgtccccggtgcgctgcagacggggaacggaagcccggccctttctgaccggtctgggagcggacaaagcggcgtcttccatgctggccctcacgcgggcagcttccctggcaagcagagcggtctgtcgcgccagtcttttttccttcctgttcatacgccaggcacgccattcccgcagcatggcccggcaaaacggccggggacgcatcccgactgcataaaccagggccagcaaatagcccagcccggaaaaagccagcacagcggatctcccggccaacggaagaaacagaccagttcccagcaaatggcccgccagccccccggcgccctgaatctggtggcgtgccacccattcattacccggcacatgcccggccgtcagaaacaggcatccgaataacagcaggaacaaaccgccgtaaaccacgcttcggggcagccttccatggtggagcagacggtaaagcccccaccactccaacaggataaccagcatccaggccatggctcccagcatccaataaaaaattcccgcaccatataatcccgccgttcccagcacattggaggtacccggtataaccagcccggagccatttaaataactccagcctatttctcgcacatcaaatgtcagcatagcagccagaagagccgccccccccaacaaagacacggcaccccatgccattccaatccaaacaggggaacgcccctcttcatgctcaaatgcatgacgctcctgcatatccaatgccatacctgtttctatcctagcaattcttcgccccaaactcaaggctaaacagggaagaaaaagaatcgcccgaatccgcttccctcaagacaggaagtgccggcttacggaccggaaataaggttttttaaacacttttgccactctggaagagtatcgctaggaattcctttttttacctgagaaaagaccgtccctgcaccgcaaatcaataaaaccgaatcaatttcaatgactatttttcatatccatttgattatttattgttagcctaaatatctattacaaaaaatataccgttcgacattttttcatgagttatgaaacatccagcgaatttcaaatcctattaaaaaaatagggatattatgatttagtataactagataatgattagcgtttaaaaaaaatttaaccatataatttttacaacttttttatcttttccgaactcgggaataatgaataagcttttttttttaaatgattgctattgacaccggatttgaaatccgctaattgagaatgctcttcctcatgacattgaaattacaatccgttaaccaggcacgactttcatgtacaggcaagtcagcggccactccccggtattttgtccggcggtactgcttctgccagtatcttttcattattgatgattattttcccgctttttccatgtgaggggaaatatatccccctttttcaaacccttgcttgtttcaaacaaaaaaaatcaaaatcatcaaatttaaaatgatgactgaacatatagcggcctttttctttcaaacttccggaagattgaaagcatggagggcatcacgccattcccgtggtgcttccgggccaaggaagaaaatcctttgagccggaatggcctctttccctgtttttatcaccatctttcctcccaaaagcaacgtttcctcctccctcaccaaatgaatacaaacaacctcatcaataaagccattctgtgctccctggccatggccggagccgctctcctgccctcctgcgtcagccccaaggaagtcctctatatccaggatgtttccggaaactccagggaaaccatcaaggcaaactaccagacaaccatccagaaggatgaccaactctatatcgcagtcagcagcaagcagccggagctcaccgccccctttgccatgtctgaaatcggttcctccagcggcacctccagtaacaaacccaaaggatatttggtggatgcccagggctgcatcgtcctgcccgtcatcggcaaaatgaaggctgcgggcaaaacctgctcccagctggcctccgacattgccgctactctcaagaacaatgactacatccgggatgcctccgtcaatgttcagatcatgaacttcaaattttccgttctgggcgaagtcaatgctcccggaacctacactattgaaggccagcgcgtaaccattcttgaggccatcagccgggccggagaccttaatattgacggcaaccgggacgtcacgctgatacgggaaaccaacggaacccgtcaaatcgccagtatcgacctgcgcagcaaggatttgttcacttctccttattattacatccagcaaaacgacatcatttacgtgaccccctcagaccgcaaggtcaacacgcgcagcgatgccgctcaatggtacggctggggtctctccgggcttggcattactctggccgtgatcgccttgtgcctgtaacggacattccgcctctttctcgtccggcttaatcatacctgtgaacggaaatatagggacggtccgattgtatcggaccgattccccaggggttcagtatttccaaacaacattccaccctctttcctccatgacaaataataccgctcccactcctcctgttacggaaaatacagaagaaacagctctttccctggacacggtgctgacgatcctgcgccgttactggttcatcatcattctggcagctctcgccggaggcacggcggcctattacctggccggcaaacagaattatatttaccagaaaacggccagcgtcctgatgcgcgatgccaaaacaggcagcgacgcttcttccgaacgcatcatggcggaattgaacatagaccccaacgcggctaacctggccaatgaaagcctcgttctcaaatccaccgcattaatgaacaaagtggtggaagacctcaacctcaacacatcctattggcaaaaaaaagatttcagggagcttgatctttaccatgccacccccttattggtgcactttgaacaaatcgacaaacaacgagcctgcaccctgcacatcacgccgctggatgaaaagcgcttcacgcttggccatcccaatgatcagggggaactcatcctgctggaaggtttttacggaaaaccgcttacgcttccctttgccaccatctccgtccatcccacctccctgatgaccgacgcatggaacggaaaagccgtcatcgtaagacactctcccgttcttgaaaccgccaacgccctgctccgtggcctgacaattacccgtccagactccaaggaatccagccttctggagatgactctgacatccagcaatcctcagaaagccgaagacacgctcaaccaccttatccaggtttacaaccaaatttccaaggacgaacggaacaaggcgtctcttaaaacgaaaatcttcattagggatcgactaaaagaacttggagcctccctgagcgacgtggacaaaaaacttaccgaatttaaaacgaagagtgacatcgtcaaagatgcggacacaaccatgagcgcggacttcagcacctcccaggcgctggaaaaggaaatctttgatcttgaaactcaaatcaaactggcgtccacccttgctgacaatctcaaggaaagcgaacgcaagcaggggctgatctccgtagaaaccggtcttcccgattccggcatcgcccggcagatagaacattacaacgaggcttatctggaatatcagaaaatcgctggaagcgccggctcccaaaacccgattgccgtgagcttgagggagaggatgaattccaccagagcggcggctaacaaagctctctccaactaccgcagcaatctggatctcaaactcaaccagcttattgacaaaaggaattccctgactgaacgcctgacggaaaccgccatcaaggaacaggaaatcattccgctcatccgtgaacacaaggttaaggaagaactgtacctgatgctgttgagcaaggaacaggaaaacgccctggccatggcggtaacggaatccaatgcccgggtactggaaaccgcccatggctccaacctccctatctctcctaaaaccattaaatacgtcgccggaggaacggcgggcggagccctgctcagtatcctggccttcatgggagcggccatgttgaacaataaggtcaacaacaagcatgacctccccgcagcaaacaggcagccggtcattgccgaactgcctcaaatgagcaaaaaagaaagcaaaaacaccaagcttttcattcaggacgaacattccgtcatcgcggaatgcttccacattctgcgcaataacgtagattccatgctccccaggcctgaacaggggggacatgtcattctggtcacctccaccctccccggagaagggaaaaccttcacctccgccaatctggccgccgctttcgcctatgccggcaaaaaagtactgcttattgacggggatttccgcaaatcctccctgacccggcgtctcggcggttccggacgcaaaggactcacttccatcctgctccaacagaccaccgacaccaccggcatcattcgccccctgggagaaaactcccgcggcatggatatcctttacaccggccccatggtgcccaatccggtcaccctgctcagccatcccctgttgggtcatatcctcggcatcctgaaaaaacagtatgatgccgtcatcatcgacgctccgccctacggcattctggcagacaccgccattctggcatccctgagcgatattaccctgtacgccgtgcgcagcggaaaaatcgacaaacggtatctgctccaaatccagcaactggccgatcaggggaaactgcccaatatggcgtacatcatcaacggagtcaacttcaagtccgccagctacagctactatggctatggatacggctaccagtatggctacggaaccaaagaaccgcagcaaaccagcaggaaacaaaataaataaggcgcaggccatacataagcccaaggccttcttccctgctttttactcttttcggcagcaatcatgttcggcaacctgttcactccccggtatgcgacatccagcctttttccggacggcatggacatgcacacccatattctatggggagtggacgacggagccgcctgccttgaagaaagcctgggcatcattcgccgactcaaggccatgggactcaaaggagcttactgcaccccccatatcatggcgcgctacccggacaatacgcccgatttcctgcgccgccgtttcgaccagttgcttgccgacaccagggaagaacaattccagcttcggctcgcggcggaatacatgctggacaaccagttccatgagcagctgcgccgatacactcccctgacctacgacggaatccacctgctggtggaactgccccagtactaccttcccggcgcctggaaggacatgatcagctccgttcgggacatgggatacgtccctgtcctggcgcaccctgaacgctatggccgcctcctgcaacaggaagatttcctccaactggcccggcaggaaggcgtcaaatatcagggcaatgtcggctccctgaaaggattttacggcaaatccgccgcagccctggcacaaacgttccgcacccgtcaactttacgaatggtgggggacagacagccacaacatcgccatggccaaacgcatgcctctgaaaaactaactccgcctaccctatcaacaacctctcgtactacacccatgtcagcccctacaactaatatccccttcagcaacccgctgtatcgtaatcataatttttacagacgttacggaaaacgcgccctggatttcacgggtgcactcttcggccttatatgcctgtttccggtattagccattctggctattctgctggccatcgtccagcggacatctcccttcttcctgcaaaagcgcatcgggcacggcctcaaaccctttcatatcatcaaattcaaaaccatgaaagacaccagggacaaggaagggaacctgctcccggacgaagaacgcacaacagtcctgggatccctgctgcgcagcacctccctggacgaactgcctgaactcatcaacgttctgctgggggacatgagctttatcggcccacgcccctggatccccgatcaaatggctattttcaacccttccacccggaaaaaaagaatgtccctgcgcccgggcatcacggggctggcccagattcgcgggcgcaacaacctcaccttccgtcagcgggtatgttatgacctgagctaccaacgccacctgaccttccggtacgacctgaatatccttttttacaccttcctcaaggttgtcgagagagaaggcattcagcagcgtccagatgccctgagcacaccggcccgtgtactgaagcccagggatttgatgacctacggattgaaagaaaatacgcaactcatcttaagaagtatccgaaaggaacccgtcccatccttgagcgtacccgcccatcccttgacccccaaagacctgccgaccaaaggccttagggcaaatacccagcttatcatgaggagccgtcagaaaagcgtccaataaaactcctccatactctccccccaaaaaatgaaaatttcagtcattacggtttgttataacagcattacaacgctgcacgacacgctggaaagcattctgcggcaaacctacccggacgtggaaagcattgtggtggacggggccagcaaggacggaaccgtggaattgattgaaaaatacagtcaccaattttccggccgcatgaaatggatatccgagccggacaagggaatttatgacgccatgaacaaggggataggcatggccacgggagatgtcatcggctttctgaatgcggatgactattaccaggacggaaacgtgctggaagccatcgccgaagcgttttcccggcatggaacggacgctgtgcacggcaatctgcactacatcaacggagcaagggaaatcgtacgcacatggcgcggaacggagtacactcccggttccttccagcgcggctggaacccggcccaccccacgttctattgtaaaaaggactgctttacccgttacggaggctttgatcctgctataggcagcgcggcggattttgagctgatgatgcgctttatagaaaaaaaccgcatttccaccgcctatatcgaccgcgacatggtattcatgcgcaccggaggctccagtacggcaggcctgagagccattctgaggaatacgcgccagaacaagcaggcattcaaaaaaaacggcatcccttacccgtggcattacggagtaacccggctgctggccaaggctggcagtatgcgcaatcccatcctttacctgttcaaaacccgttaaattttctgttcccattcctttccgtcacgccgtcatgaacctgattttctattttgaccaacccatcctgccccatgcgggaggaacggaacgggcggcatatcttctggcacaagccctgtcgcggcacggccaccgtatttccttcctgtctctccaacaggcggatgttcctcccggcggactgccttacttcacccttccgcggcaggacacgctcttctgcagggaaaacagggaatatgtggaaaatctatgctccgcacaaaagacggacggcatcatcaactgcggggccaatcaggatgactcctttttcttcagccatgaacaccttgacatccgggcttccatcatttcctggatttcctttgacgtccgcacagggctggattatttctcctgcctgctccggaaggatttctccacctggggcaataccatgaaaacgctgttgcgccatgcgctgctgccctgtaaaaaacacgcggccatcagcaacaagaggaggaaatacagggatatgttccgcggatcggacaaggtggtctttctctccccccggtatacggaagacgccctccagctggcgggccccccggaaagggcccggctgtacgccattcccaacctgctgacttatgatcccgttcagccagaccttttcgggaaggaaaacgccgttctttatgtgggacggatggcggactctcccaaaaaggtggatcgcctgctgaatgtctggaagaaagtgcagccgcttcatccggactggcatctgtacctggtgggggacggcccggaacgcggcaatctggaacggatggcggcgcgcctgaaactggaaaacgtccattttgagggtgttcaggaacccgcgccctattaccgcaaggccagaatactctgcctcacctccacccacgaaggcatgcccatggtaattaacgaagctctctcctacggctgttttcctgtagttttcaacagtttccacgctgctgaagacatgctgccgaaccgggagacgggacgtctcatcccccccttcagcctgcgcctcttcgcgcgggaactggatgaactgatgagcggcccctacgtcccgccctgcaccaaagtattaacgaactatcacccggaaaaggtcattcccctgtggatggaatgcctgcaagaccagccatgagcaacatcgtcatctatcttcccaatgaacccctgggcaaacagggaggcatggagcgggccacccatcagctggccgccatgcttgccggtgaaggccaccgggtaacgctcctctgcagaaacaaaaacaggctgggggaagaatacgtgcctccgacggatctcgtgttcattcccgcagccctcagccggaaggaagaacagaatttcctgcttaaccttatccgggaaagagaaattgagagcatcattgaccagacggaaggcgggattgtggggcggtggggaatcttccggcatcgcgggcacatgaacggggtttccgtcaaactcattgccgtgcagcatagttcccaatatacctacctgaaacattaccggaccgtcaaccggagaccctccggacgcggcctcatcggcaaggcacgttcatttttctatcatacgcttatactggcattaaaaaaatacagggcagttttgcttcagcgcagcctgttccgggaactggcttcagactatgaccggatagtgacgctttcggaagggggcattgaagaattcaaaaaactgtgcccctccgtccccgggaacaagctcgtctgcattcccaatatcgtggaaccggccgttctctccaaggaagagagaaaagaaccgcgctgcctgtttgtcggcaggctggacaacccctcaaaaggagtggacaggcttctgcgcatatgggaaaaagtggaaaaaacatgtccggactggcatctggacattgtgggcgacggaccggatgcggagatgtttaaggattccgcccaaaaactggggctttcccgaattgcctttcacggcttccagaatccggaaccttactattccagagcctccgtattctgcatgacttccacgtttgaagggttcggccttgttcttgtggaagccatgcagcacgggtgcgttcctgttgcctttgacagctaccctgccgtccgggatattatctcccacggggaaaacggcatcctcgttcccccctttcaggaagaaatttactcgaacgccctcacatcccttatcaacaatcccggcgaactggaaaaattcagccggcacagcctcgtcacatccagaaacttcagctcctcaaacctggcggccaggtgggccgccattctgtagaatcaaaagaacttcatcaaaccatttgtaaaaatgaaaatttgttttgtcgcatggtctgatttcggaataggaggcgtcccaagagttctgacctgcctgatggatgccttgtcacgcaaacatgacgtaagcctctactccctgaaaaaccttccgcagtcaggcatccaaggaatcaaccgggaacaaattcacatttactgcagggaaatgaatttatatgagaaaattcgccgctccgcagcggacgttctcgtctgcaaaacccctctgttcagctccgcccttggctgccggctatacgcggccgcacgctacacgtcaggcttcaaaaaggcgctgacgaaccatctcaatgaacatcaatatgatgtggtcattttcggttccggctttgaagactccctgcttctcgccctcaccaaaaacaagctcctgcccagcatgagaatactgacatggtccatgcttcctatgacaattatttcaccaatatgggctccttcttctcccggtacatgaaggaagccatcaaggcatattaccatcgtttcgatgaaatcatcgtcctttctgacggggacgaaaaagaattcagagaaaaacaccatctccccgcccgtcgaatctacaaccccaacacgatgaacccggccagaaaatcgtcccttaccagcaaaacgttcgtttacgtcggggctctctcccaccagaaagggactgatctggccgtccgcgcgttccacaaattcattgaaacggatcaggaatggaatctccacatctatggggaaggcccgctgaaaggatggattgaagaatatgtatcctccaacggtttgcaccacagaatcattctgcacgggccctgcggaaatatggaggaagaatttccccgccattccatcctgcttttcccctcccgctgcgaaggcttcggactcgtccaggtggaagccatgtgctgcgggctgcctattctggcggcggatatacctatctgtcgggaaatagtgggcaaacatcaggccggcatcctttttgagtcggacaatccggaagacctgtgccgggccatgcgtgaaatgacggcctcagacctctcctcctatgcggcaaacggcctggccgcggcgcctctgttcaatctggagcagactgtctctgaatgggaaaacatgttcaacgcagtaaaatcatgaaacatttaacattactggaacctatcagaaaagaaggcaattaccaattcttcatgcaatggttcgcggacgcatgggcagccagcgggggaaaaacggtcaggggaattcgcgccccatggaatttgcgtctgctgatcgccaaatcccgaatctcaaggaatttccccctgttcaccagctcacgcaaggcgttgctggttccaggggccggatacccggactcattcgcgtggccgttcggctataccaatgaaatcgtgcccatgctgtgggacgtctggccccggtactggccgcgcctcatctcttccctgaaacgccaccatgtgcaaacattgttgtgcacgtcatcccaggtttgcgaatacgtggctgaaaaacttccgcatatccacgcggttcacgttccggaaggcatagaccccaccggctatagggacggaggagccctggaggggcgccggacggacattctccagatcgggcgcctgatgcagcctgtacacgaagccatccttcaaatgcggcaggaggcgccgcacctcagctatctttacccggaagaaccgggccgccttgtcttcccggattttccttcgctgtgcgaagggctggcttccacaaaaatcgtcatctgctatcctcgctgccgaacccacccggaaatggcgggcgatgtggaaacgctaacgcagcgctactgggaatgcatgctctctggaacgctcatcgtcggccatgcccccaaagaactggttgatctgctggggtacaatcccgtcattgaactccagacagacggggacatcggcaaccggctctcccagattctggacaacatcgccacctatcaggaactggcggacaaaaacctggccgccgcccgggaaaacgcatcatgggagacaagaatgacccgtctccttccgcaattgcgccaactgggatatatgcagtaacaatctttttcagtctcactcagaaccagcgaatccggacatggcctcactctgcaaatactgggcttttgccttcattctctgccagcttggccagcagcacatgctcttaaacggcattggctccatggggtctttccttcttctggggctgggagctctgttgctgctgatcaactccggacgcgtatttgaccggaaaacggtcgcatcatctcctttcatttattccttcgtcttcattttcatcctgtatcaattcacattcggtatttttgaccttaatgagaaaacgggaatttatctgattgccaaggtcgtctgctgcctgatgattgcgctttccgtccagaaggagctgccattctatttacagcgcctcatgccgattctgtcggtagtcaccagcctgctcatccttctcggctttgttcacaacgacgttatttttgagggccgccacaccctgggattctgcaacgcgaatgggctgggagccatttcctcattatgcgcaggagccatgattctggattcttccgaccgctcaaagaaaaaaatcgccatcatccttctatgcgtcctggccaccttcctctccggcagccgggcttccataggcattctctgtttgactttcgtcatcaaatacggtctgaacgtcaaatttctggcagtactcctggccggagtgctcgcctggcaaatcatcctgcccatggcgggaatctcttccaccggcctgaaccggttcacggaatccgtggaaaatatggatttctcatcctcccgggaaggcgaacggaaagcgactctcatcatgatcgccgaatcccccatcctgggaaacggctttgacgtggaacagagcgaaaaagccaaggcggtaagcggcctggggtcccacaacggctatcttgacatcatgaaaatgataggtattccctactctgttttcctgtttgcgttcatggcgtattatacctgctccgtctggcggaaattccacaaatccgcctgcgattatgacaggatacacctgttcgtcatcatctccgttctaatcgccgccaacttcgaatcatatctatggggaatcaaccaggtggtcaccaccctgttgttcacctccttcgccgtattgcaaaaacgcatgacagaccttaaacatggaatctgaaaaaacatatttctaccctgtcctctcggattatgacttcggctggttccgtttatcaggaccggggcttgccaactgcatgtttgtggcggctcgcgcctacatactcagcagacgggaaaacgcaggctacatttcccccacctggatcaaactcagcccggggacattcctgcgccgggagaaagataaaagagtttatttcaaaattttcaatgagctgggaatcaaaggtttaaaaaaagcccaactgctgcttgcggaaaaattgcgccccggttccgggagggtgaagcaaatccgcggcatgggggaatactttgacgacctcaatgaacacatggatctggtgcatgaattcatagaaaaaatcaccaggaaggaaatcattgaaaacgtgcgtccggaagccctgaaggactgcatcgccattcacgtgcggctgggagactattctccggagatgcgggtggatatcctctggtacgtgaatcttgtcagggaaatcctgtccatcaagccggcccagcaattcctcatcttttccgacggctcggacgaagagcttcgggagctgctggccctccccaacgtcaggcgcgctttttacggcaacgcctacgcggacatgtacgccatcagcaggtgcaaatgggtcattgcttcggactccacattctccgcctggggagcgttcataggggaacgccccatcctgttcaacaaaaggcacttcaagcgggtgtaccggaacagcattcctgaagccgttctgggggacagcacccgcattccggatgaattcaagacgctgctttaactatgaacaagcaatatgacttcatctacctgaccaatacgccttccttttacaaagtaaggctttgtgaggaactggcgaaaaaacactccgttctcctggttctttacggctatggggcggaagcggtcaatacccgcctctccggcaatgagggaggttttgactacttctttctgcatgagggagatgcgggaaaaagaaacaaggctcttgtcctgctcaggctcctgaagctaatggcctgggtccgggcccgcagagtgctgttctccggctggatggcgccggaatacaacatatacagctttttttcccccaggcgccgcaatgccgtcatttgcgaatcgtcagccattgattccggcatgaacggctggaaaggcctgcttaaaaaagccgtcatacgccgcatgagcgcggcgctgccttccggttccccccaccgcgccctgtttgagcatattcgttatccgggagacatccatgtcacgggcagcgtaggcatctttaacatggaaggccgctgcgccctccgccattccccgtcctcccccctgaactacatttacgtcggccgtctcgcaccggaaaagaatctggaactgctcatcagggaattcaactccaacgggcggcctctgtccatcgtgggggacggccctcaaaaggaacttctcaaaaacatggccaaagacaatatccgctttctgggccacgttcccaacgacagcctcccggaaatatatgaacggcatgacgtgttcatcctcccctcccgctatgagccgtgggggctggtcgtggaagaagccctcttccgggggctccccgtcatcgccagcgacaaggtgggcagcgccgccgacatggttgccgctctggaaacgggcgccgtcttttccctgtccgcgccggacggcctgcgcaacgccattcatgaagttgaaaagaattatgaaaccatggcgcgccgcgtagcggacatcaactggaacagccgcgtggaaacgcagctcaaggcatacacctcccttttagattaatggctcccatattacaaaccatcgcgtcccttgactcccgttcgggcggcaccagcacctgcacttatgacctggtcaaagccctgaatgcttccggcatgcccacggacatcctcaccctccagcccggctccccacaagaacggatggtgggagaagacagctttatccatgcctgcccgtttgacgcccgcacccctctcgccgtctcccggaacatacgccgctttctggccggctcccggtacaacctctaccacaccaacggcctgtggctggacgtcaaccacgccacatgcgtgcacgcgcgcaaaatgaatgccccctgcgtcgtttccctgcacggcatgctgtacccccaggcgctggagcgcggcggctggaaaaagaaactcatgctcgccctgggacaccggaaagacatctctggagccgcctgcgtccacgtcacctgcgaaaaggaaatggaatactacagggacatgggcttttccaaccccgtggccgtcatccccaatccggtgcggatcccggaatatcttgcggatatcaggcgccccgggcacgagggcttccgggccggattcctgggcagactccatcccatcaaaaatctggaggccctgatcacggcctggggtcagctgcgcctcccgaacgcggagcttctgctcatcggtgacggagacccggaatacaaggcccggctggaagaactggtccgggcggaaaacatttccaatatctccttcacgggctttgtttccggaaggcggaagtatgaaatgctctcttccctggacgtcctgtgcgcccccagccaccaggaaaactttggaatgagcattgcggaggccctgctggcgggaacgcccgtcatcgccagccggggaacgccgtgggaagcgctgaacacccgccggtgcggctggtggtgcggcaacgattcctcttccctggccgcagccctggaaaacgccttcaatctctccccgcaggaaaggctcgccatgggagaccgcggacgcgccctcgtcatggaaacctgcgccgctccccacgcggccgaccgcatgaaacgcctgtaccggtatctgctggggcaggaaaccaaaccggaatttgtctatctctcatgaacatcctctttttgctcggaaaattcccttccataggcggcgtggaaaccgtcaccgccattttggcgaatgaattctccgcccggggccatgcggttcatgtggtttcctttgaacaggtgacggaaaagccctccccagctctggacgaacgggtcacgctgcaccggctgagctaccccgtttccagccgggccaaccggaatgcgctgcgggacatcctggccatctgcggcattgacgtcatcatcaaccagtggtgcctgcccttccacgtcaccaggctgtgccggaaagccatgaggggcctgccctgccgcctgctggccgtccaccataacgccccggactgcaacgcacggctggaaggcctcaggatgcgcatggcccggacgggaaacccggtgaacagagcgtttttgcgccttctgctgaaaggctgctcaatggccaccggggccagcctgcgttacgtttacgcccacagcgaccgttacatcctcctttcagacagtttccaccaggctttccggaacatcaccggactgaaagataccggaaaacttctgacgattcccaaccccattaccgtggaaaacccggaattccgctatgatccggccctcaagaaaaaggaggttctttttgtcggacgactggaacccaaccagaaacgggtctcccgcgtgctggaaacgtgggcgctgctggaaccctgcttcccggactggactctccgcctggtgggtgacgggccggaaaaacgctcccttcaggaattctgcgaggaacaccgcctgaagcacgtctcctttgaaggcttccaaaatcctgccccgtattacgaacaggcctccctgctctttttaacctcggaatatgaaggattcggcctggtaatcgtggaaggcatgtccttcggcgtctcccccattgtttacggaagcttcaccgccgcctatgacttggtggaccacggaaaggacggctgcatcctgcctgcggccggcggtttccaggcgcatcggatggcggaaatggccgcagggctgatgcgggaaccggccgccctgcgcgccatggcgaggaacgccatagccaaaagccggaaattcacgcgggaacatatcattccccagtgggaaaaagctttcctcccagacgcctcctgaacacgccttccccctttctctctacatggaacagccccggaaacaaacggacatcgcattaaccatcagcgggaggcttgccgcatcctgcgccgtggcctatatggcgctcccctccctccttttcctgctgggatgggtcaggcccctgttttccattccggccgctgcggccgtagccgccgcctccgtcctgctgagcgcaacaatcccggcccccacgcttcacctgaccaggcggcagctggccatttacctctgtgccctcgccctttccctcctgtggcttctggcgggcggaatgacggggatcacatcccagcacgcggactttgtggtccgcaaccccatttatgaaaccctcatccgttgcgactggccgctggtggacgcaggaggcagccatttcatttactacctcgccttctggctgccaccggctctggcgtgcaaatgtttctcctgttcggacatattcatcattaactatgtcctgaccgcctggacggggctgggcctggcgctgacccttacggtcctctggagcagattccgctcggccaccctgctcttcctgctcctgctcatcttccagggcccgctggacggcatcgtcaggtgggggcttcatttgctcaatttgcaggggcccctggcccacgaactctacctgacggtactggctttcttcggaggcgtgccccccaccatgcagcttcattacacctttcatcacaccacgctgctgtggctgttcctggccatggcggtctcctggaacattccgcccaaataccagctcttcctggcctccctgtgcctgctcgcctctcccatcggctcgctgggccttctggtcttcatcgccgtccgcacgctggtccaccgtactcccgtcaggcaatacttctcctcctggacggtgctggcgggcgccgcgctggtgctgctggccggcatctattttacaagcagcaacggaaacaaccgcatacgcctgacgtggcaggactccccctttgacctgctccagtacggcaactggaaattctggggcgccatggccggttcctggttgctgacggtcggcgttccggcggctcttctgttccgccgcttcaaaaaagacgccctgttctggtcagccctggtcattctcacgctcacctacttcatttacataggttccgtgggcggctacaatgaattctgctacaaggcctccagcgtcagcttcttctgcctggctctcctattcacccgcatcttcacggaacgggtgggaacgccccggtggcgcaaactgtgcgtctgttatctgctcctggccgcactccccagcctctccgtcttcgccaaagccgcacccacgctcgccttgacgaagtccgcgcggctcgccaacatgcagcgggaatggaaggggcatctccaccatccggaacatccctggaacgcgcccctttggggagccggagaaagcggcgccttccggaacatctatttccagaaggcgggccaatccgcggaagggccgctggccgccttttccaccggaataaaaacagacacggaaccagccgccgtaccccggccataacccctcttttaccactcacccccatccccagccatggatctttcccgttaccaggaacactactccctcagccaccgcctcaaacggtatggctggtacatcgtcaaccggacgctcttccggctcatggtcaccaacgccatgaaagtcccccggaacctgctgctccgcctgttcggggcaaacataccgcttgcctccctcgtttaccccagcagcaatatctgggcgccatggaatctctccgtaggggaatacgcctgcatcggccctgatacggaaatttacaacaaggcccccatctccatcggaaaccacgccgtcatttcccagggggccttcctctgcacggcctcccatgacatctcggatcccgcccacgcccttatctccgcccccattaccgtggaagaccaggcatgggtggcggcgcaggcctttgtgggcatgggggtgacggttggccggggagccgtggtaggagcccgcagcgccgtattcagggatgtggccccctggacggttgtgggcgggaacccggcccgattcatcaaacaacgcacgctccgctaaaccatgcttgacctctccgttatcatcctcgccagaaatgaggaactccatatccgccgctgtctggaaaacattcttcccgtcgttaaagaagtctttgtcattgactgtttttccacagacgataccgccgccatctgccgggaataccccagggtgcaggtcatccagcatgaatggcccggcctgtacgccctccagttcaactgggctctggacaactgccccatcaccgcagaatgggtgctgaggctggatgcggacgaatggttcatgccggaagccctggaagaactgaaggcaaaactgcccgcccttcccccggacgtcaccggaatcatccacaagcgcaggcatattttcctgggccggtggatgaagcacggcgtttacccggtcaagctgctgcgcctgttccgctacggcgcggccagatgcgaacagcgccatatggacgaacacatggaactcagccggggccgctccgttgaattcgaatatgacttcgtggatgaaaacctgaatgacctgggctggtgggcacataagcacgtggactattcctcccgggaagcggcggatattgaagacatcctctcctcctccgcggcggcctccggcatcgacggccaggcaggcagaaaacgcgccatgaaagaacgctacgcccgccagccgctcttctggcgttccttcgcctacttctgctaccgttacttcctgaaactgggttttctggatggcagggaaggatttttatggcatttcatgcagggatggtggtacaggaccctcgtggatgcccggcaattcgagaaacagaaaaaaggctccgccaacacggaacgctgacccccattaccccgctttatctccatgtccccgcttttttccatcatcgtccccgtttaccgttccggccctttcctcagggactgcctggactccatcaggaaccagaccctgacggactgggaatgcatctgcatcaatgacggctccccggacgacagcggagccatcctggacgaatacgcccggaaggacgcccgtttcaccgccatccaccaggaaaaccggggcgtaagcgccgcgcgcaatgcggggctttccctggcgaggggaaactggaccgcctttgtggacggggacgataccgtggagccggacatgctggcctgcctccatgaggaaactctccgcgcgcaggaagccgccctcctctgctacggaatcagcaaggacttccatgcgggttcccggctcatccgtacggaaaccaccctcccaagccggaaccagcacatccccgcgggggaaacgggggctttcctgcgctacctgctgaccagcctggacatggaatcctcctgcaacaaattgttccgcacggaactcctgaaaaaaaacggcctcctcttcaacacctccgccgtcgtgtttgaagacttccagtttgtcctggactacctttccgcctgcgccccggacatcatcctgctcaaaaaagccttctaccattaccgcgcgcaggaaacggaaaacggagcggccaagcgcagccgcttcaatctcgtccgggacatagacacgctcacaaccaaattcctggcctggaccagcaccctttccctcccgcaggaagatattcccattgtcaaaggctacatcctgcaaaaaatcagcgtgattttccatgccctccagcggcagccctatgccgcgcgcaaggaagtattccgggacttccttaccagcggcctggccgcacgcaaggcggagcttcccctgtgcggctgctacttccaccttgtctgccgtctgctggcggcgcaccggtaccggctggcccaccttctgctgaagacaaggaacatttaactctctgcgcatcctcatccaaacggcatcgccaacacccagcctttcaacaatatgacccagcctcttgtcagcatcgtcattccggtgttcaatgtggaacaccatctgcgccaatgcctagattccgttctccgccagaccctgaaagaatgggaatgcatttgtgtagatgacggatcgccggacggcagcggagccattctggatgaatacggaggcagggacgcgcgtttcaaaatcatccaccagcggaaccaaggcgtttccgccgcgcgtaatctgggcatagagctggcctccgccccttatttgacattcattgactcggacgactggattgaggacgatgcgctggaaaacctcctttccgccatggagaagtccagcgccgatatggtgatgtgttccatctgtatccatcagaaaaatcatcaggaggtttccatggaaacgccttaccctccctccggaaacatgagggacgaatacgtggtgactaatgaatccttttccggggcgaatctggtagatgtctccatctgggcgaaacttttcagcatggaaacgatccgcacccatcaaatccgctttacgccggaactcaaggtttccgaagatatggaatttgccacgcggatgctctgccgcagcagatgcgtctccatcatccgaaaacctctgtaccattaccgtgccggccacgagagcagcattatgaacaacattgtccgcggaagaatgaaaacgtcggatttcatcaattccatcaatgccatctatcgcctctaccagtgcgtcccctccggtctggaacgcggggaatgcagggaacgcattacaggcacactgagaagggctctttccggaaaaaacttctaccggcaaatcatccggcagcttgaacacaaagatcaatccgctatcgaagcctcaacctccttcccttacatgaattacctgaggagggggaaaaagcttgcttctcttcagatgatcttacgacacctcagaatgcagttcggcttcggaacccgtcttcaggctctctcaaccgctatcaggaacttttttaaaagctgacgcccatgaagataggcattatcaccatccattattcgttcatcacctgcaactacggctccctgatgcagttatatgccatgcagcaggtactggcggggatgtccgtccaatccgctctggtcaagcagctccccaggccgctccccgtcccccccccgcctactgcacggcaaaaactgaattattactgccggcatccttggagttttctttcccgctgcgcccgttccctgaaaccggagcgcagggttccccggaaaactccgtcatttgaatcctttattgaacaggagatacacgccctgtcccccattttccttcccggagaactcaacgcgcaagaactggattttgacgcatacctggcgggcagcgaccagatatggacatcctgcgaaccggaaaaactcctggatttcgcccctgccggcaagcgcatagcctatgcagccagcgcggcatgggggaagcagcccccggaatggtatgctctggctcagcgggaattccctaaattctccgccatttccgtccgggaaaaacacggggtggaaatatgccggaaagctggcgcagaaacagttgaagttgttttggatcccacactgctcctggaatgcagggaatactcccggctgacggaagggcggccgccgtacttttccgaaccgtgcgttctggggtattttctcaacatcgaccagctttcccagcttccctggaagcaggtgaaagaagccgggaaaaaaatgagcgctccgctccgcatcattcctctccagggagcggaatgctgcatcccggaaaaatattccatctccccgaatccttatgaatttttgcagtccttccaggaagccctctgcatcatcaccaattccttccatgggacagtattcgcgcttatcatgcgcaagccctttataactattcttcaaaaaggagaaacagccgtccagaacacgcgtattttctccctgctggaatccctgggtctggaagacaggatctaccatccggaaaaaggctccatggccggacaactgaaccgtcccattaactggacggccgtcgaacggaactgggaggctctgcgtattcattccatggagtttctaaaaaacgccattcaacaatgtacctccgctacccgtcatggctgaagaaaacagcaataagcgcattgcccgcaacaccatgctgctttacacccgttcgctgatcaatctggtcatcgggctgtacacgtcgcgccttaccctggacgcgctgggaatagcggattacgggatttacaacgtcgtcggcagtctggtggctcttttcggactgttcaacggcagcctgaacacggccatcagccggttcatcacctatgaactgggaaggaacaataaccaaaggctgaacaaggttttttcttcttccctgagcatcctctttatttttgccctggtgatattcatactgggggaaaccgtgggactgtgggccatcaactaccatatggtttttcccgtggatcgaatgaatgccgtcaactgggtctatcagatttccctgatgacattcctggtaagcctgctcaacgtggcgtacaccgcaacgctgacagcgcatgaaaatttccgggtgctggcgacagtagaaatcctgttgacaggaatcaaagtaatatgtgtcatcctgctttattacgctcctatggacaggctgatttattttgcctggtacaatttcctgcttacactggcttcaagcggcttttatgccctttactgcagcaggcattactccagctgccgctaccgggccattctggacaagccttttctcaaggaaatgggagcattttattcgtggaaccttttcggttccatcgcctggctgctgaagggggccggcatcaatgtggtcatcaacctttttttcggcgtactcatcaatgccgctcaggccgtggcgtcccaggtctcatccggagtaacctccctgatggggagtttttccagcgccatgcagccgcaaatcacgaaaagctacgcggcgggagactacgaacacatgtggaagctggtattcaacggaacgcgctacagcttctttcttctggccgtcttcatgcttcccctgtgcttcaatattgatttcatcctctctctctggctcaaggaaatccccgcatacaccaatatctttgtgattcttctcctggctaacgtgctggcggaaagctactccacctatttgatcaccgttctcctggctacagggaaaatcgccttttaccaggccagcgtgggaacaatcctcctgttgaatgtcccgttaagctatctggtctttcaatgggggggccctcccgtttctttcctggtcgtctccattgtcctgaccatcatggcgctgatcatgaggctctggcttctgaaaaaaatgctccgcttttccgtactttcctttcttaaacaggtggttctcaaaacagtttccgtcagcctgctgatctgccttgtcaactgcaccatttatctgctgttgcctgacatgtatggaaaacgcattatttttcttttttcaacgtctctcttgtccatccttctcacttatctgacaggattgaataatcaagaaaaaacattgattcttcaacagcttaaaaaaagaattaccttccttatttcctgatttaaaaactttcccgttaaccgcaatccatcatccatgaatatgttgaacctcctgaaaaaaatctccaatcggctcaatttcatattttatacacactccagccgctataaattgaggtatctttattcctacgatcggaaaaggttcatccgccatgcaggatcccttcaccatgaggagaaggaacaaaaactggcctctgtcatcatggcctaccatgtagtagaaaaaggattaagcatgcctgagaggcgtctggggttcggccatgatgccgtcttggaactcatcagtctgataagaaattattcagaaaagttccctcaaaatgatcaaatcctgcatgccatctccgtcttggacgcttaccgcgaaatgcacagaaaagaaaacttcagcctccgtccggatctccagcaggcgctggacagcctgctggcggacttcccccctgcggtcaaggaagacggtcagatagaaataaccagggaactatattatgcccatttggaatcctcctttcccgaattttcggcatcccgccattccgtgcgtcacttcaatggcccggtttcactggaacaaatagaacgggccgtatcccttgcccgcaatgccccatctgcctgcaacaggcagcatacccgcgtccattgcatctgtgataaggaaacgcggaaaaaagtgctctccctccagaatggaaacaggggattcggtcatttggccgacaagctgctcatcattacggcggatctccacgacatccgctgggaggaagaacggaacgacctgtacactaatgcaggaattttcctgatgaacctttgttatgccctgcacgccaacaaagtggcgcattgcctcctgaactggtcagtatcccctttccgggatatcctgttaaggaagctggtttccattcccgaccatgaaaccgtcatttgcattcttgcctgcggcgattgcccggaacagttttctttagcgtcctcgcctcgcaaacctgtcagcgagatattaaccgtacaccgttaatttcgtctgtgttcacagcatacaattccctctatccggttacgctgtaattttcatttacggaattgtttactccagttttgctttgttttattgattttccctgctttttcatctgagcaatttgttgaatattaaaagccagaatcttttgagaatcttacagcaaggctattccgcataattccgttcatttatctgcaattctgattaatatgaagcaaatcacttcactcagaggcctcgcgattattctgatcatccttttccacctcaatccggaacatttcccctacggctacttcggcgttgaagtgtttctggtgatttccggctacctgctcatgaaatccctccagaaacagcagatgcaaatccgtctcggggaatttgcccgtaaaaaagtcttaagactttttaccccggttgccgtcatcgtcccgctcactcttctggctggcatgttccttctggactatacggacctggcgacagccagttccacaggcggatatacgctgataggcgccgcgaacaggttcctggccgtcatccagtccgactatttcgcgcaggattcttccggcaatccgttccttcacatgtggtacctggcggtaacggcacagatttatcttttgttcgcggggggatgcgtcctgtaccgttaccttcccaaacgggcggtcgcctctcttttctggatcgccggcatcgggccctttctctgggcctattcctatcccattcacaacctgttgcaggaaatcggcctgcccgtctgggagcaggtccgccccacctcccattacatgacgctgccccgtttgtgggaggtttgcgcagggattttgttagcaatatacccccccccctttaagttcaacacgttgcgaaaacagcaagaaaaacgctctcctcttcatccttggaatgttatgcatcctcgtacctgccctttcccgcggaaaggacgtctccctctgctcggcggccgtagttttggggacatgcctggtgatccggtatgcggaatccggcaggctggcccactggttcaacaataaacttctgctgtggattggaggaatctcgttctccctttacctggtgcatatgcccctcatcgcgttctatcattcgtggtttctccatgcccccggatggcccggaatgcttgccatcggagcggcgtccgcagtcctgggaggtctcctgtaccttacagtagagaaaaagcgcatgaagatgaaatggtttatccccctgtaccttttcgcgttgcttctatgcgttgcaggaaggcagacggaaggattccggaactacatcaaccaggaaatcaactccatttccagcccccagctgcatggcgcatcggaaatcaaatctcctgaagccgcccggggatttgataaggaagccatcaaattcaataacaacatctttgccttcgtcagcagagccgatttcaagggaagtgcggaacccggcctgctgcagctgggttcccctgccgaagctccatccatagtcctgctgggggacagccacgcctctgcggccttttgcggattggacgcagcatgcagggaattggatatctccgggatttacgtttcttccgtcatttccccattctggaacagggagttgcccgcgctgccgtttgatgcaagctactattgcgacgagaaaaaaataaaggccctcatggcatggctgaacgtccacccggaaatcagccatgtggtgatagcccagcactggagcgcccgttacgacagtaaaaatgtaatggactggaagctgaagccgcttccctccggcgaacctgcctattcaaactccctccgtgcatttatctccgaactgcgggcgatgggcaagcaagtcatcctgctggcccccactccgctcatcaagcaaaatgacgtggccaaatacatcaggaacctcatacgcaggggggaaacgggaaaaggcctggaaagccttacctgcacgcggcaaaaatacagggaagatcatgccgccgtgcttcccatccttgaccgtcttgaacaggaagggctctgcaccgtcctgcgcatacttccctatataccggaagacaggccgttcaacgcctatgaacacggggaaatcctgtacaaggatagcgaccacatgtccagcaaaggctccatcaaactcttccagcacctgaaaccccagttaaaggaagcgctgaaaaaagaatccacggcatcatcaggtttacaaaagccatagccgtgaacacgtctgccgcagctccggcggggaaacatttaaataaaaccggcttttgtggaagctatagagttttctttgggaaaaaaatgcctttgcatgatgaataatgcgccaaatgtttaacactttttgtcatacattgaacatatctttccgtttcttttctggtattgaagatacacttgctaaaaataaaaatattgttattatatttttcccctctaattatgcaacataaaaccattattgctacatgtgcggccatggccgctttttccggcatggctactgccgatatccagcttcccctggatgttttaaacgccaataacggcggcaagacattctccgcccagctgggagcaggctacgctaccaaatacatcagccgcggtctggctttccagaatttcgcaagtgatcatgtcattcccctggaagccgtcggcgcctatcaactgaacaatcaatattccctgataggcggattaaaatatcagtggctgacggataatggtctggaacacaatgattccggcatttgcgacgaaggctcggccatcttaggcgtcagccgcaaattcggaaaatccactgtcgcggctctgagttaccagtttgtccacggcggtatccccggaagtttcaacatccacaatacaggcaacaactccggcttccctgctttcagccacaataggccggaagaacacagcttcgttctggacattcaccatgacttcggcaaagggctggaaaacttcttctgggactgccgcgtacaatatacgttccgctggatgactggctggtggttcaccaatactctggggtacaggtatgacgtcaacaaatccacctccgtcatcgtggcgggcacctggaacgccactgccggctattttgacagcaattccctgaacgccaatggaacccagggcatttccctgacggtttccacccctgtcaaggccacgaaagacctgaccgtgactccgttcgtgggtacggtctggctcggcaacggcggcctggcggccaaccaccgcggcgcttccgcccgtttcccttacagggagccctccaaggtttaccgcaatttcaccttcgtcgccggggtaggagttgcctacaccttctaacaatctgactgtcattcactcaaccaacgcaagctccggcatgtgccatcaatcatgccggagcttttcttaactccccatgcccctgtccgccgttttccacacttcctccattcagaagcaagtggccgccctgagcgacgcattcgccatcgcaggagaattcctccattgcgacgtcattaacagcggccatatcaacatgaccttccgggccacctacaggaagccggacggcaccacccgccgctacatcttccagcgcgtgaacgatgccgtgttcccatgccccaaggatgtcatgcacaacgtggaaaaggtaaccaaccacatccgctggaaaatgctccgggtgctgaaaacgcccttccgccagacgctgaacctgtactccgcgcggggcggccgcaaatacctggaaattcccggttccggcttctggcgctgctacaactgcatagaaaacacccacacgttcgacgtggcggaccatccccgccaagcttacgaagcagcccgcgctttcggcgctttccaacagctcctgtgtgacatgaatccggaggacatccatgaaaccattccgttcttccaccatactcgcaggcgctttgaccatttggaaaaagccgcggcagcagactcccacggacggctgaatacctgccgcaaggagctggacttcatccgccgccgtgaacgttatgtggacgtgctgctggatctccaggaacggggggaactccccgtcagaatcgtccacaacgacacgaaaatcaacaacgtgatgctggacagggagacggacaaggctgtctgcgtcattgacctggacaccgtcatgcccgggagcgtcctgtacgacttcggagacatggtacgcaccatgacctcccctgcagcggaagatgaagaaaatctggataaaaccttcctgcgcatgcccatgttcgaggccgtcgtcaagggatacctggaggcctccagagaattcatcacgccgcaggaagtctccaaacttgctttttccggtctgcttatcacgctggaaacgggaatccgcttcctgacggactacctggaaggggacgtttatttcaaaacgaaaaaagaacggcacaacctgcaccgtgcccgcacccagctcaggctggtggaaagcatggaagagcaaatgcccgaaatggaagaatgcgtccggaaatgcttccagactgttaacggctgagagggcatgaacggcattaccccaattttatgatagtaccggaacgcgggctggtgctatactgcggggcatgttaaaaaatatttctcccctcatcagcccttccctgctgaaaattcttgcggaaatggggcatggcgacgaaatcgtcttttcagacgcccacttccccggccataccttcaaccctacggtgctgagggcggacggcctgggggcggatgccctgctggctgccgtcattcccctcttcgaactggatgcctacgcaacgcccgtcatcatgatggccccggttccgggggactctctggaccctgcggtggaagccaaataccgcaaggcgctgaactatgacggggaaattgagcaaatggagcgctacgctttttatgaacgggtcaaaaaggcctatgccgtcgtcattaccggggaaacggccaaatacggcaacatcatcctgaaaaaaggcgttacccctctttcctgaccattgaccgccaggcagaccttccatgcagtacgattttgacgaagtaattgagcgccgcggcaccggagccctgaaatatgaagcgctgcttccccgctggggccgggacgacctgattcccctgtgggtggcagacatggacttcaggacgcctcccttcatcatggaagctatccgccgccgctgcgaacacgaaatcctgggatataccgtcaagccccgcgctttctttgaagccatcagggactgggtggactgacgccacgggtggaaggtgaacgcctcggaaataggcttcgctccgggcattgttcccggcatttccagcgccatccaatgctttacggaaccgggggacaaaatcatgatccagcctccggtgtaccacccctttgccatgatcatccgggaaaacggccgggaaatcgtcaacaatcccctcattctggaaaacggccgctaccgcatggacttcaaccacatgaaggaagccgtgcgtggttgccgcatgttcatcctgtgcaatccccacaaccccggaggccgcgtatggagtccggaggaattgcgctgcgtggctgaaatctgtacggcaaacggcacgctggtcgtttctgatgaaatccatgcggatctgacccttcccggccacaggcacaccgtattcgccactgtttccgaacacgcccgcatgaactccgtcacctacatggcgcccagcaagaccttcaacgtgcccggcctgggcagttcctacgtgatttgccagaatccggacctgttcgcgaaataccaagactttgtcagcggcagggagcttgcggaagggcacgttttcgcgtacgacgggctcatcagcgcctattcaggcccggaaggggaggaatggctggcccaggcgctggactacattcaggaaaacatccgcttcattgacgcggaactgcgtcgccgcatgccaaaaatcaaggccatcatgccggatgcctcctacctggtatttctggactgccgggaaatgaacctttcccagaaggaactggtggatttttttgtggacggagcgcgcctggctctcaacgacggttccatcttcggcaaggaaggggaaggcttcatgcgcctgaacgcgggttgtccccgctccatcctggaacgggcgctcagccagctggaggaagcctatgaaaaccgcggcttccggcaacaacaatcacaaaattaaagacacgcatcacgctccccggcaatggaattcatttccggaaccatgtattggggaaattttcccggggacatccagccccgccgtattttctcctgttgagtcccttgcggagaacgctgcggcgcggtggaaagggaatatccgcacaaccccttccgccgtttcgcccgcgacccccccttactctcccatcccatgctgaaaaacacgcccgggatgccgccatgactttgcttgcaaaacggcaggaaaggagtatcgtcccccgcatgtactatatcaccacggccattgactacaccaacggaccgccccacatcgggcacgcttatgaaaaagtcctggcggacgttctcgcgcgctggcaccggatgaagggggaggaagtctatttcctgaccggggtggaccagcatgggcagaaagtgcagcagacggcggaaaagctgggcattacgccgcaggagcatgtcaacaatatcacggagcaattcctggcgttgtggaaccgcctgggcatcagcaatgacggatgggcctccacgacggatccgcgccacaaggcctgcgtgcagaaaatcctgacggacctgaaggacaaggggcagctttacaaaaaatcctacaagggattctactccgtgcgccaggaacagttcctgacggataaggaacgggacgcggaaggcaacttcggcccggaatggggggaagtggtggaactggaggaagaaaactggtatttccgcctgaccgaccatgtggaatggatgaagcagttcgtggaaaagagcagtgattttgtccttccttccttccgcaaggcggaagtgctcaacgccattgactttgactcggacctctgcatttcccgccccaagagccgcctttcctggggaatcgaattcccgttcgaccccgaattcgtcacctacgtctggtttgacgccctgatcaactacatttccttcgccggctacctggcggagccggacagcggcctgccggaattctccaaactctggcccgcggactgcgaagtcatcggcaaggatatcctggtgcccgcccacggcgtgtactggcccgccatgctgcatgccatgggcttttccgacgaggaaatgcccaccctgctcgtgcacggctggtggaacatcaacggggaaaaaatgtccaagtccatcggcaacgtggtggactccaacctgctggcggaacaattcggcccggaacctgtgcgctattacctggtgcgggacatcaccaccgggaaggacgccaactttgatgcggaccgcctggtcatgctgtacaatacggagctggccaacgacctcggcaacctgtgcaaccgctccatcaacatgacgcgccgctattgcgactccgttatctccggcgcggaggcatatgatgacgaagcctccaaagccctgcgcgccaccatggaccaggccgtcaccctgttttccaaatacatggacgacaacatggcctccgatgccctggcggccctgaacgcccaggtttccgcctgtaacgcgtacattgagcagcagcagccctggcagctggccaaggatgaagcctccgccccgcgtctccgctgcgtgctgcgccatttgctggaatgctgcgcccaaacgggctatctcatcggctgcgtcctccctgacgcctccgcccgcattctgggtcagctcaacgccggggacctgttccggggccttacgccggccgcgctggagtggggaatcctccccgcagggcaccgcatcaatgatcccgcccccgtttttccccgcattctttcggaagaggaaaaggccaaactggctgaaaaagcggccagggcggcaaaaaaacaaggctgattcccgtgaattcctccgcatccttcgtcaaatccctgctggcccaatgctgcctgggcggcatttgcgagtgggtggtctgccccggcgcgcgcaacatggcgctgcttcaggtgctggctgccgcggaggatctggtgaaatggactcactttgacgaacggtccgccgccttctttgcgctgggccgcattcaggatatggggctgcccgtggccgtggtcactacctccggaacggcagcggcggaactgctccccgccgtggtggaggcctactaccagcgccgccccctgctcctgctcacggcggaccgcccggcggcctgccggggttccgccgcaccccaagccatcgaacaggcggatctgttcggcatttacgcacccacaattgacctggaaacgccggaaagcctgccggaagacattctgcaagactgggattacgcctcccccctccatatcaacgtgtgcctgccggatccggaccctgcctggaaccccggcagctgcgacctttacccggcggaacctccggaggaaaacggattccggggctccctggcagaactggcccgggccctgcgcttcaaatcgcgcgacgggctggtggtcatgatcggcggcctggaccccacggaacaagccccggcccggtggctggccaacgaactgaaagcccccgtggtggcggacgccacctccggactccgggaagagctggcccatctggctctgacggacgcagacgccctgctgagggaacacccgcccgccgtcctgctcagattaggggacgtgcccgtgggccgcttctggcgcgacctggaggacattccagccacggaagtcttctccgtcacccgcaccggcttctccgggctggcccgcccctcctccgtcgtaaccggagacctggaagccattctgcatgcgctgggggatatagataccgtgggcgacgtcaacggcctgcgcgccatgaacaaacgcaggaaagccctgatggaggaactgctcatcacctgcccggaaagcgaacaggccatggtgcgctccttctcctgctttgccgcggacggagactgcatttacctgggcaactccatgcccgtgcggtactggaacagcttcgcccagacgtccatccccacggaaaacgtccgcgccaaccggggagccaacggcattgacgggcaaatctccggttttttgggggtctccgcccggtgttcccgctcctgggctctcgtgggcgacctgaccgccatgtatgattccaatgccctggcactccttccccaactggacagggggacccgcgtcctcggcgtcatcaacaacggcggagggggcatcttccgcaccctcccgggagcagacggccagccggaaaccatgaggaagctgcttgtacaaccccacgcccattccttcaaggccattgcggaacaatggggaatgcgctacctgaccatccgcacggcggaggacttcgaccaacttgattccctggaggaaaacagccagacgcttgtagagctcatcccggacagggagcagacggaacagatccgcctccggctggccaacgcccaggtgtagacatgccttcaccaaaaacgaaaggaagccggccttttgcccggccatatcctgcgattctttccaaatggattgaaaatgccagataaaaataacatttcctgcatctaaccatagggaaatttctttcttgccagacgaagggaagagactacattaacggcgattcatgaaaaatgaatctccattgagacgacggcgggagccgtcaggaaatagatggggaatccggttagaatccggagcagttccgctactgtaattcttccacaggaagataagccagaataccagcctgatggatgcctatgcatatggcgggaaaccatttgatagaccatgttcaccagaatcatatccgctttggataaggagcgccccattcacggcgtcctctgttatttccggttccatgtctcaaccggactttcctgtttccggtatccctgaatgaacggaaccttcccatccggcggtttcgcaaccgccaatggcaagccttttttctggaaaccggtgcatgggctgtgcgtcaacacaaagtccatacgaaacatgatgagtaaaaaacaactgctattactgttgccggccctgtttgcggccatttcaacccttcctgcaaacgcggcccacatcctcacgggaggaggaaccggagctgtaaatgccagcggtacgggcatctccatgcaactgaaccagggctttacttctgatactgccctgcccggagccgtgaacctcgactccatacagctcaagctgacggacaaccggtttaccgcggacttcacatccggcagccttaccatggtggtattcaccaaaccggcgtcggacagcgcggactggacggtcgtcgggcaatcccgcacggaagaaaacctctccgtgaatatcggctcctacaccgacgttgaatttaccttcagcaacctccttctgaatacatcgcaggaatacgtcttcgccttcgtttccgacgccgccatgctgggcaggctgacaacaggcacgagccttcaggcagaagagggaattgactccccattcagcgtagacaacggatttgcctacgcctccatgcagtcaacagccttttacagcggggctcccgtcatactctactacaatacgggcaacgaaacgagcatgtacttccccaacatgatcgtcaccgtctccgaccccgaaagcgtccccgaaccggctccatgcctgcttgtcacactgtcgtgcgcgggcctgctcgtctcacgcagaaaaagataacctcgaatcgccaaactactggaatatccggtacggctacggccttctgcaattttcccaactgcctttcgtgcggagggaaaagccgtatcgggtcattgggcattccgcccatccctcaacgcaggctcagggccttcatctggcagagctggctgccccagccgtcttccgtacctcgacctcccttgcatagggctgcaaaccggtacggaacttcagtccccggtgtttcttatcatgtgggcacagcgtactttttcattcactctctcggcattcaagcgcggttgaaaaaacaggattgctttctgtccagaactccaacccggaataccagcagggaagaaccgtggccggacttatcgtaaaacaggtatcagaattcctccttctccatattctcattaatttgcagaaaaggatgttctccgtcggatcacggtcgcaatcctccaacgtccggggaacagcctcctcccgccgctctcccggcattttccccatcggcagaaagtccgccgggactgcggaaaccgcccagacgaatgatgcacaaatagccaaagccgcatgcaacagggcagtactatgaaacagcatgtccgccttaatattcatacggcaggaagcaccgggccgtcatccccttttttccgcctccagaggcatttgacgcagtctccccctcctgccattaaatacgttcctgcacggcatgaaaaaaaccgggcggaacatcacatccgcccggtttttacagccgtccggcgcaaacgccggagacatgaggttgccggccttccgccggaaaccagttaaaggtagctgcgcactacgccggagacgcgttcacgtgccgcggcaatgcgcttgcgcaattccagcgtataggcctccatatcccggatgggggactgggccacgccggaaatcatggccgcctgggctaccgccgggcattcccattcaatgatgcggggatcaatgggcttgggaatcacgtagtcgatgccgaagctgagcggggctcccccgtaaaggtcaatcacctcctgaggaacgggttccttcgccagatcagccagggagcgggcggcggcgatcttcatctgttcattgatgacggaagcgcgcacatccagggcggcacggaaaataaaggggaagcaggaaacattgttcacctggttgggccagtcggaacggccggaccccataatgcagtcaggccgcgcttttttggcatcctggtacgtaatttccgggtccggattcgcacaggcgaaaatgatgggggaaggagccatgagctttaccatgtcctgcgtgagcagtcccttggtggacagccccaggaacacgtccgccccggtgagggcctcctccagggaacagtcttccgactgggagaactgggctttcgtggcgtgcaggtcaatgcgcccggtatgaatcagccccttggaatcaaacatatagatatgttcgcggcgcactcccagcgtcatgtagaacttggcgcaggaaatgccggcggccccggccccgacaacgacaaccttcatatcctccagcttgcggcccgtcaactcggcggcgttcagaagggcagcgccggagatcaccgccgttccatgctgatcgtcatggaacacgggaatattcatctcctggcggaggcgttcctccaccatgaagcattccggagccttgatgtcctccagattaatagcgccaaaggtgggctccatggtcttgatcgtttcaatcagcttttccggctccttcacgttcagctcaatgtcaaaaacgtcaatgtccgcgaataccttgaacaaaacgcccttgccttccatcaccggcttggccgcatcagggccgatattgcccagccccaaaacggcggtgccgttggtaatcacgcccaccagattggaacgtccggtatacagggcgctctgggaaggatcttcctgaatgcggagacagggttcggccacgcccggggaataggcaagcgtcaaatcccgttgtgaaaagcagggcttgcagggaagcgtttccaccttgccggggcggggctgggaatgatactgcaaggcgtctaatctaatatcggaactcatgattgtaatggaaaaacaaaaaagcgagccttgcttgcaccacataatcgccatgcattcaagcaaataatcaattaatcgcgtcacacgttccggcccctgaaaacctctttttacattgaaggaagcctccggatatgctaataggcagtcggataatcacctgtcatgtgaccatggaacatacgccttctctcccttccggatttaatatcaacggctatcttatccaatccctgaagcagacggattccctctgccatgtctattacgcttcggatgccgaccatgttccatacctgctccgcgaattctgtccccaggggctcgctgtgcgcgacccggaaagcggaaaactgcgctatccggaaaacacggatattgaacgggaagttcttccgctgaaaaatgatttcgaagcgcagttccgcacaggatccctgggggaaatccccgctctgggcaccctgtacctggtttatgccattcccggcggccatgccgccgcgcagccggcctccggcacggtcgtcccgccggcatcccgcttccagcgtgatcagcgtaccttgaccactcccggaaccggggcgacgcccgttcatgcgggcacccttcccccgccgcggaaaaagaagaactccgccggcatatggattctcatcctgctcctgctgggaggcgcatgcgggatctactatttcacccggaaccccgaggaaaaatccgcctctgcccaggagccggagcccccccaagccaacagggaaaagaaggaagacgccaaaccggaaaagaaagccgccctgcccgccgtgaaggaggaagccgcccccaaacaggaaaacgccgcgaacacctcctcatccggccctgcggagcagccggaaaagactccgccggccatttcctccggggaacggaatgaagatgccccgggagctttagaggaaaaatccgcagccgaccctgcacagcctgacgaaaacacttctgccccggcagatgacgctgcgaacggaaaacagccggaaccgcagcatcccgccaaccggaaggaatcacaggcggaacagaccgccgccaaacctgcgcccgtagtgcgtccgcgcgggaaagccgccaggcaaacgaccaatatgggggatgtgaacgcctatgtgaaaaaattcgccaagcccatgccgctgaaccagtggagaaaacaatacgcagagctgtacacgagctggttcggcaactccgaggaagtagccaaaggctggatcaccaccttcggccctctgggcttccgcgcccgcggcctggacgcctcctggccggacacgaacttccgcggcttcttccctaaaaccatgctgactccaacggggaacccgtggcgaacctttacacggtcacccaggtgattgagggttcccctgccgaaaaatacgtcaaggaaggagacctgatcctgggcattgacggacacctcttcaaaacgtcgcaaagcctggacgtgctttacggcccttatcagcatcagaacaggcgcggcctggacatgcacgcgggccttctggtggacaaggcggaaggggccggaaaaatcaccctgaacctcattcccgcggaaagcgtggaaaaaatccagggcatccagcctctctggaaggaagtcttccgggaggaacaggctaaaaagcccgtttccctttccattccggtagagggcggccagcaggtgcgcctgcgcgtggatgacggcggcaacggcatcggcagcgacggcttcgaatggtcggatctgaggctggaaggccccggcggaaccgttccgctgaccaaagcccagcaatacaccgtgggttacggagaagccaggtacgacgccaaaagcaaaatatggcaggcgcacgccgtctcttccctggtctttgatatccccaagggtgactggaaccttaaaggaacgggaacccccaggtggtccgcctccgtgggcgtgaccgtacaggtgggcggctcctccgccctgccggacgcagtgaagaaatatgtgaaaaacgtcaccttcaaaatcccccagcttggttcctatgccctcggcttccccaaaaattgcgccaagagcaaggcggtagtccacatgatgagcgaatggctggcggcccagcagcgcgaggacggctcttgggaacgcccgggcggctactgcggcaaccattatgatacaggctgggccggcctggccctgatggccacgggcaaccctaagtatgaccccgccattaaaaaagcggctcagtacatcgccttctccggctcccaatgctggtgggccgtcccccaggcttccgcgggcatcttcctgtgcgaatactggctgcgctaccgggacaactccgtgcttccggccatccgcaacagcgtgcagcgcatgaaaaacgaagttctttatggggacttcgtcaccggccacggcattcacccgggctaccggggaacaggcgtcagcatcggaggttcccacatgtgcctgttcctggcgctggccagcaaaactccggcgcgcacggaagacggcgtgctggacaaaatgatgaccatgcccagtccatctgccccaccggcatggggccctatggccgcatgacggaaaccttcacctttgaacccgaccgtgaatgcgggggaacctactccggccgtcacggcccgtactacatcgcctccctcatctgcggcggaccggagctgtacacaaaaaacagccgcatcatgtatggggaaggccccatcggcggctgtgaccagggccactcctccgagacgctctccatcatgtgggctctccccgcctactggcgaaccaatccggaagcatattacaaaaacatggaggctttccggtggaaactgacgctgctgcgcccctttgacggcggcatgatgcagaaccccaaccgcctggaactaatgacggcggactccgtcatcggcacctacatccgcaccagcatctggatcacggccctctgcgcggaacgccagaatctggcaattacgggcaagcctgaatccaggccaaaacgttccggaaggtgccccccatcattgacacggaatcccgcttcctgaacacctacgtgcgcaactggtgtatggtaaacgctgcgcttggaaccaaggcccccgcctccctgaaatccgccatccgggaattgaaaaatattccggtggaacagggctgccgctttaagcttatcaatgtcgtcaacaaccgagccctccccatcgccaaggccatcatggaaattcccggggtggaccagctcaccagggccacctgcgcggaaatggttctgggcatggatgtgcgcattttctttgaacccaagcgcaaggacgataacccccaacccggggaatattctttaaccgtggatgtccagcagccgctgggcggccgcgccctggggcttcaccgcgacaaggaactggaaggaaaagccaattccgcctacaaatatgactttgccggcacggtgcaattcagcgacacgaccaccttctcccccatggaaaccatttcctggacgcccaattccaaattcggcggacagtggaacgtttactcctacaaaaaggaactcagcggccccacccagccgggcgtgcagaaaatgaacgccaaaatcaaatggcgcgtcaatgacctggatgtggaatacgaccgccccatcgccgtgggcggctttgaagtgggatgcccggaaaaagccctttcagtcaccaactgcaaccatctgtgggtgccgggtatcctgatccgggaccacggcaactggggatgctccttccatctgccggacggaacctacatttccgcggcctcccagggcaaccagatagaggtgtacgacaaaacggacaaaaagaaggaaacaacctgggtttccccgaatgactcctgcctgactcaaggttcccgctgcctgttccgcgtttccacggactggcacggcctggaatgccgtgtgcgtgaactgaaactgctgggcagttccacggaggaagtcgcggactataagctgaaagcctctaccggaggccgtgtggatacggccaaactactggacagggacgctaccaccgttgaagaactggacgcgtccccctcggaagacgagcccctggtgctggaactcaccctaaaatcccctgccgccctgcgcgccgtggacatcaagattgaaaagggcaacaaccgtttagtcattgaagccaacaaaggcggcaagtggattcctattcactggggctccctgggggcctctactgccggcgtcagcgatgcgcagaaagccatgtacgcaaatgaaccggaagtactgcgcatgctccagcttccgggcaatggatttatcaaatgcatgcggacgtttgaccctgtcaccaccaacaggctacgcatcaagctcttccagaagggcggaaaagtccgccttgcggaactgcacgtgtacaaggcaaacgccgtcagaaatatggctctccagtcttaaacggctttcacctgcggcctggaataacaaaaaaaaaacttgtgatgaggaaatcccggcaggggcgccaatctccgtgtccctgctggaaaaaccggacataccattttaaggagggcggaaattccctgctccatgccggggcggccagccaacttcttgtctattgacaccaagccgcgcctcccctatatttccttattatgttcatcaggacaacgctcctttttcctattctttttctctcactttcaggatcttccgtcatggcggcaaccccttgggcttctgacaggaactgggagctcgtttttgaagacaattttgacggctcatcgctgaacgcacacaactggagccgcattgattacgtaggatataatgccccggactggcgcaaataccaatcccgggacgaaagccttgtggaattccgggaaaaggacggcaactccgccatgaccctgtggggaaaatacggggactacaccacccaaaccaaccagaccgccccagccaggacatacgcctgcggaggggtatattccctgaaaaccttctccttccaatatggctacgtagaagtccgcgccagattcgactgcgtgcagggcgtctggccagccatctggatgatgcccaaatccgacagcatcggctggcctgtcggaggggaaattgacatcatggaacacctgaattacgaaggccgtgtttaccagacaatccactggtcgcaaaacggcgttcccaaccaggataactcccagggggtcacccccggttggaacgatggtgctgaaaaatcaaactggcatacctacgggatggaatggacggaagaaggcatcaccttttatgtggatggaaaagcaaccggttcattcaaaaagcccaataacgcaaactggccctttgacaaggacggaaacgaattctacctgatcatcgaccagcagattggaggcaactgggtggaaaacgcaggagttaataagggaatcgaccaaaatacgctggccaattccggagccgcattcgacatcgattatgtcaaagtctattcttcaagcatctacaaccacctcgtcccggagcccgctgtggcttcgctgggcctgttgggaatggcgttgctggcggctcgccgcaaaagaaactgattgcccacacaccttttccttttgttcctccctgccgcgggaataaatcttccgggacattcccggcatattctcaggcaaaaaccgtcattggcacctgcctcaatatttctggactggggatgaaggcagtttttctcctccgtcctcttccaggcggcatagagcctccgcacggcggaggcaggaatcccacagggaagccttttccggaaacgggaaacacagggagtcactcagcttttccacccgtttgaaagaatcctcccggtcataggcgttcaaactttccaggcgggaagccaacccatccagccagggaagagggtcatggcaaatcagaggaagatcgcatccggccttcagggacaggaaggcggcgtcatccggtgaatactgcgtcgtaatcgcccccatgcacaaatcatccgtaaacaccacaccccggaaaccgagacggtcacgcagaagccccctgatcacccgttcagacaaggtggcgggataatcgggatcaatctggggcagcatgatatgggcggacatgatggaggacaatgccggacacagagccagaaaaggcagcagatccgtcttgaacagctcccgttcatccaggccgatcacgggaaggctgaaatggggatccgccagggcacgccccatgccgggaaaatgtttgccgcagctctgcacgcctccccggcgcaggttggaggcataaacgccgccgcgtgaaataacgtcctgcgcattgtctccccagcagcggccgggcagcgcgttggctgcggacggatcatggcaaatatcgagcaccggggcaaaattcaggttcacccccaggtagcggagagccagagccgtcaccgagcccagttccacgatgccgccaaccgaaccgagccgggccagcgaagccggggagggcaaattcaagcccagggaagcggtgcgaaccacccgccccccctcctgatccacggcaatgacaggatggtggaggcaaagtttccgcagcgactccgtcagaccgcgcacctgctccacggaatcaatattcctggaaaacagaatgaacccggccggctgcaaacgccggatggcagcctcttcctccgcgcccacttcatggccgcttatgccgatcagggcagggagcatggacggaaaaagattaatggcccaacaaggaagtcctggtgtacagcgggtaaacgggaatgccgcgttcctcaatcgcctggcgtcctccttcctctcggtccagcagcaccagggcggcggcaaccctgcccccttccgcctcaatggcatcaatagccttcagcgtggagcctcccgtcgtgataacgtcatccaccacgaccacggtatccccggcctggaaattgccttcaatgcggcggccgcgtccatggtccttcggttctttgcgcacggtgaacacctgaagcgtcttttccgccccttccagagcgctggtcatgccgacggccaaggaaatagggtccgcccccatggtcatgccgccgatggccgccacctccgggaaacggggcaaaatatcctccttcaccagcttccagcccagagcgcccaccagggtggctcctacggggtccaaggctgtcatgcggcagtccacatacaaatcggacaccttgccggaagccagtgtaaaagttcccgtacgcacggatttttccaaaagaatgcttttaagaagatcgtattgttcgctcatgaaaatagggatgaatgaaatggttcgccgtgtataacagatacccccggaataagcaacggataacagcatgcaaatcttgacaaaaaggaggacaggccccataacctgcctgtcattttcccgttcccatgaaatccggcatactggcgttagtttctatcagttccgctcttgtttcctgcacatcgtacgagaggcccccgctgtttgaccaaatcaccggaaaaattcagggaatgtccggacgggacgattatctgtccggggtgggcgccacctcaggcgtcaacacggacctgcctccggaagcccgtctgggccagggatattgggacctgccggcgggcacccagggggaaaagcacatcatcattgacctcaagcagcagaaagtcttctactacgtgggaaccacgctcgtgggcgtttcccccatgtcttccggcaaggaaggctacggcactcccaggggaacatacaaaatcatccagaaagacgccaactacaaatccggcacatacggcgttctgcgcagcaaatccaccggagccgtcgtcaacggggattacaacgccagggctggcggagcgccggcaggaacctactttgaccccgcccccatgccctactggatgcggattacgggaggctacggcatgcatgtgggttttgtcaccggatatccggtcagccacggctgcgtacgcctgccggaggacatggccaagatattctttgaacacacccccatcggcaccaaggtcaccatccgttagccgcttcctgcgcggtctcgcgccgcagaaatgccacactttccggaaaccggcgtgtttcttattcccgccgtccggaagcgttccgtgctgataactgctcccgtttcatggcgcagcttcctcactccggcattgacaaacggctccgaacctttttgaatatacgggatctttgacctcttgattcgtcatgacaatccctcctccccctgccctgccgccccatttcaacataggcggctacaaaatcacggcgcttgtagaaagcggtccggactatcatctgtaccaggctctttccccggaaggccatgccgtcctgatacgcgaattctgcccccggggcctcgttacgcgcgacctggccagcggagaactggctgtctctccggaaaatgaatcccaattcgcccaggcccgggaagcttttgaaacccaatacgcagccaatgcagaaggcaagctgaggggattcggcaccgtgctcttcctttacccgctttctccggcgcaaccccagccggctgtagcgcatgcccaggctctccgccccgcaaaaaaaccgcagcaaccgcaactgcggaagcccgtagtcggcgccgccatccccggaacgccgctgccgcgggtaaagcactccggagggtttccggtcatcacggtcattgtgaccgggatgctcgccctcttcggatttctgggctaccagatactcaaggataaagaagaacccgtcgctaaagccgttaccgtgcccgtaccggctccgcccaaacccaaacccaagcccgctccgccaaaaccggagcccgtggtggtcactcctgaaccggaacccgtggtggtcgctcccgaaccggaaccggagcctgaaccggagccgcctgctcccgacctttccccctccccggaagtcattgccatggaaaaggctttacgggaggaagctatcgcgtccaaagggaaattttctgaaaaactgttgaataaatatccccattacgcggaagcctacgtacgggattacgtgaaaaaacgcggaggcagtttttctccggattttgaaaaatggctgaaaaacacgaaaaacaatcgtgaagtcttcgccatgttcttcccgccggatcccagcgtcgccaccaatgtggctttcatgattgatgaactggggctggaaacgacggaaaaatatgaccagctcgttctggcgttcgcagtaggacgccgcgaattcggcatgggagccttcgaccttacccatcagggccgttacgttgatgccctgggcaagctgaatgatctgagatcctccggagtcatgcctccgccagcggacctgtactgcgccgggaaaccgcccgtcaactggtatgggaacgccccccgcaccgtggatgaggaatgctacaaaaaggtggaagcctatctggaccgcaaaaaaattacccccaagcaggcctggctcaggaaataccccaccgtctcggaaattggggactccgccattacggaagacaacctggccggctttctgcacgaatacatgtaccgccacggccagctgaggcgcaagagggatcccttccccactccggtggaattcttttcctacctggtggataaatatgaacattgcggtgatttgcgcgacgtggaccgcaagcgtgtggaatggaccggcgtctccctggaaggaacgccctggccggccatgatggccctttcggaaacgcgccctctgcgtgagtgcgacagcgtgtgggaacgctacatgggccagcggggcccgacccgcctgtggctgtacggcccctaccgggcggatgacgataaggaaccgcccatcctgttcagctttgacccggatccggaatggtccagggaatccaatgaacgcaagctccatgaaggcggcgtgtgcggcaccatgtcccttatctcccgcaattcccagattgcgcgcggcattcccgccgcccccgccgggcagcccggccacggcaatctgatgaccacccatttcaccggcaacggctgctggctgagtgtggggcaaagcgtggacaccctgaaagccaccacgggattctggtacttccgggattccgacgcaccgcgcaccggcaatgcggaataccagtccggactggccctgtccatgaacatcgactatgaaaagttcatcgacagccgattcgccatgaacatttacaaactggcaggcaccggctcctccacggaagagacggccgcccctcccgccacgctccccaaggaattcacgcagaccgccatgaggaccgtgctcaaggccaacccgttctacacggaagcctggtacacgctcttcaagcaggaaccccagggcctcatgggagccaccaagatggtggatgaagtgagggaggccctgccggacggcatgggcatcagaaagctttggaaaacgcgcaaatacgtttcctccgtaggccgcggcgacaagaacggcaaggaaatgcttgccaaccatgccagggaatacgtcaatgtgctctgctccgtgattctggaaaatgccctgaaacaggaatatgactataagaccttccagtgggccgaactcatgtcctggctcaagtctgaatccaagcgcaactcctacccggagcctcaggccgcctatcagatagcgtatgccaaggcccagggcacggacaggctcaaaagaaccgtagacaggggattcaagaaagctctcaatttctaccgggacgacagcaacgccctgaaggagcccaaagatgtggatcaggaggaaatgtccttttccctggccgccctgtgccaggccctgcccaaggaagaactggtcccctggatgaaaaacatgctggacacctgtccggacgggttcaaatacaagcccaaaaacaagaaggaaacgaaaatccaccccttctacgacgccctgacgaaaaactacatctctctggctgacgattcggaaaaatcccgcgtcaagtcggaaatgaaagaggcttccgacagaattctggagctttcccaggacaagaaaggcgatgggaatgggtcctccggacgccgccggagacgctgattccccgcttccgtgcacctctacgtccacattcccttctgccaccgtatttgcccgtactgcgctttcttcaagcacacgccggcctccacggacatgaaatcattcatccgtgctctgggcagggaggcggaatcccgcgtagccgctctggccgcgaaccgcggaggggaaacggccacgctttactttggcgggggaacgccctccatgctctcggacacgcatctggggcatctcatggaaaccctggaccgtctcgtgcccgtggacaaactggacgaattctcctttgaggccaaccccgccacctttacggaaaaaaaagtgcgcttctggcgcagcctgggcatgacacgcgtctccctgggcgtgcagtccctggattccggcatcctgcatctgctggggcgcgaacataccccggcccaggctctgcactccgtggaaatgctgaaaaatgcgggaatgccccatatcaacatggatctcatgttcgccattccggggcaaaccctctccatatgggaagccaccctgaaggaagctgtccgcgccggaacggaccatatctccgcctacaacctcacctatgaagaagacacggaattcttccggagcctgctgcggggggagaaaaggcaggatccggacaaagacgccgccttttttgaactggcggaacacatgctggaggcggcaggcttgcgccactatgaaacctccaactacgcccgggagggctgcatctccccccacaacatggcctactggaagggagaggactatgtgggcatagggcctggcgcggtcagcaccatcaacggcatacggtactccaacacgcgggatacggacgcctacatacgcagcacgctggaaaacggcctccccctttccgaacaggaacccgtcaccgaggaagactaccgcctagaacgcattgccctgatgctccggacggatgaaggattgccgctgaaatacattctgccggaatcccgtcctctgctggaacaataccggaaactgggcctggcggacatttccccggaacaaaggctcatcctgaaaggccgcggacgcctgctcgtggacgccatcgcagcggaactgtgctgatcgccattcccttattaacttaatatcctaaattgaaaaatacatgaatttggtttcttggcattttcaatttttgtatattattttattatgtgaccataagtggtacaaatatgttcgtatattcacatattctctctacttttttaacaggatttgttttcctgctacagatttcttttaatcaggcgtcaggagctaaacctaaaccttcagcatcggcacaggtcacccaaacgttcatcctgcccttttacctgaaatccaaacctctttctgaaaaaaagctggttttccggaaagcactctcttcttttcccttttctgaaaaaaatcccagaatacatcgcttcgtccgggaatatccggggctgacttttgacgaaggagtctctcttttcgttcagcgaactgctttgggacaaattcccggagatgtgtgcgccagacttcatgaattgacagctttgatgcagcacaggaacatgaaatcacggcaacggaactcctgtcttacgggatttctggaaaatgcctttcttcgggcctattctttccgctatgctcccattgatattgaagctctatcgctttgcgctctgatagaactggaaatggaagacgggtactctttaagccttcgaacacgcattttaaaaatttgggaaaccgcggctatctccatggaaaaagggaacgtcccgcaaagaaaactggcctcattattgtttataaggactctccggtatgggaaaaaagacccctacctgatggcccgttgcggataccggcttgccaatctttacatacgcatgaaggaacctcaaaaggcccagtgggcagcatcattcatcccgcctatccgtggcatggaagactctcgttctttaattcaacaatggactgcttcctcttccaagaaaaaaaagcgtaggaaataactccgtcaaccccatctaaccattcatgaatcaagcatttatttcccgatgtttctctcaaatgccgcttttgcttttattttccagcatcacggcattcaccacccttcacgcaaaaggccagcaggtttatgaaggaaaaacaacactggaacaaactctggcacctgtggaagtagttaacgatctctctcagcttgcggctaaattaaaacaatgctgtgccggggaactgaaaatcccaaatacaacgaaggtcactgacccaaaatctccctctactattccttataacggaaaaatttccctcaaggattttaaggatgaacgtattagccaacctactactgttgcgtggctttcattgatttccgacgatggatgcgacattgcctatactacaggggacggagaaaaaacagactggttaaaagaacacggaaaaggacatgacatttccaaagggcgccgggattgcccgcatgtcttgaaagcaggttcttacaatttccaaatcaaatattcgcaaacctattacaatcccaagccgggcacaagtgatttggacggcatcagccttgtagtcgctcccattgtcgtggacatttgcattggagaaaaatcgatcccatatagtaaaagccaccttttcttggagaaaaaaacagaactccggctcgctatcaacaaaatttacctggcaaaagggccttccgaaaactccgaagacatatccatcacatgggaagctcaaacttattccaaatgcccgcaacgatttaatggagttattctggcgtgcaaccatacgttccaaccaaacaacggcgcctggaaacccatcggcaaaggcccatgcatcacctatactccaacggaagcagaactaattcgtgtgaccatcggtgataaaagtttttattacgaaggcattcccaatcgtttaggagaaatttactgggccatccgcccctgccagggactgcccatagcaaaccatcactttctgctctttgtccctgacgacccggtaaaattaaatcttccgaaccctgggcttgctaattgcaccgctatccccagaatgaaaatcatcactattggcggggatgcagggccagaaatcaggtataaaaaaacgcttcacccgtatttttcacagggaataacgaaatacaaaaccgtgtacacccccctgcgttctccatttaagcaagcaagcgcatacagtaaatatgcttcatgtctaactaatatggtctatcataaaaacgaccaaccagacataatagctgtagaaaattggtataaaaatcaacacaaacaacattttactaacttcacagatattacaagtatggaaaacaaggaatacttccagaaagttcttcactttgctcaaagctacaatgaacaagaacgatattttacaaatccaccaaccaatcatgatcccaaaaatacagacaatggttcaaactgtgcatcgctcgtcgcctctattttacaatattgcggagccacttgggaacaaattcgccaagccgcagacacagaaggaattgatacaggcgaccagcgtcttattccaaccaatcgtttcaacccataaatgatcatcttatgatatatttaaaaatcacaacattggtgctcctttttcttgttcattcctcaatttgccatggagacatatgccatattaacggagtaagccaggaagacctgaaaaatctttcttacgaccctcccggagatgaattactttccaaggaacaagacaaaaaagcatggcagactttcattgaaaactatgaaatccctatccgtaaggttcaagattggtataattccattgtcgataaacaatctgccgatgccgcagccgattctttcaacaaggatgttctgcctattcttaaaaaactaacgggacgggctgcagacatgaaaaaacaggctcttgctattccagcttcttctgaaatgcagaaattcatattcttacgcatttctcagctgcagggacgactgctaattatcttcctgcctatgcaaaatgaagaaaaggcgagtccagaaacatgctaccgtggaagcacaaaactttttgaaattattctgggattaacatccccatcaatgattgacatttcaaaatttattgaatctcagaacgaatcacaggaaagttttgaaaccgttttcaaggaatcatggcctgaaactccatctgcttaaaaagcagtttacagcagaattgtgctgattaccatttcctcccctttccgttccatcatgattcaatatctgataatcatgaaatattccatcatcctcacatttgcatcttccctccttatttatgattcaacatgctatggagacgcctgccaaattaacggtctgagccaggaagagttgaaaaatctctcttatgaccctccaaggaatgaattgctttctgaggcacaagataaaaaggcatggcagacattcgttgaaacctatgaagcgcctgtaggtaaagtacaggattggtataattccatcagggataaagattccgctgatgctgcagccgatgcgttcaagagagatgtcctgcccattcttaaaaagctgacgggacgttctgctgatataaagaaacaagtccttgctattccagcttcttctgaaatgcaaaaactgattctttcacgtatcctcacattgcagagccgcttgctaataatttttcttcctatgcaagacagtaaaaagtcaagttccgatgcttgttatcatggcagtgaaaaactctttgacatatttctaggtctaacgtcaacaacagccatggatatttcaaaatttattgaaactcaaaatgaagaccaggaaagcattgaagcagctttcaaagaaccatggacagagacatcatcttcttaaaaagcaggttacatagaaattgcgttgatctctattgaatttccatccttcttttattccccttcattcaggaaccctgtcatgcttccataatctgatgatcttgaaatactcaatcttcctcaccgttgcatcttccatttttatttatgattcagcatgctatggggacacctgccaaatcaatggactggagccggaagtactgaaaagcctttcttacgaaccgcccaacaaggaattgctcgccaccggacaaaatcaaaaagcatggcagactttcattgaaaactatgaaatccctatccgtaaggttcaagattggtataattccatcgtggataaaaattccgcagacgcagcggcaaaatctttttctacggaagtttcacctatccttaaaaaacttacaggatccgctgccgatatgaaaaagcaggttttatctattcctgcttcatccgagatgcaaaaatttattcttttgcgcattcttcagcttcaaagccgtctactggtcattttcctccctatgcagagtgaaagggaaatggacgacaacacctgttaccgaggcagtgatcttcttttcgatactattttggaacctacagctcaatcagcccaggacgttgccaaattcattgattcccggaatgaatcccaagagcatatagaagcttcatttaaagagccctgatgcacatctgccgaataaattattaatagtgcaactattctaacctttatttggcgcaggatgtgaaaagcatctttccggaatcccgtcctctgctggaacaataccgggaactggatctggcggacatttccccggaacaaaggctcatcctgaaaggccgcggacgcctgctcgtggacgccatcgcagcggaactgtgctgacggatagtttttccgcctcagagatcagcagtctgcggaatccggtgcgaaccggacactggaataagcgggtatgggctactttatcccttgattttcaatatccaaggagcatccagtaaaaaaagataccggtatctgcgtattcggatgttgttttttcatcccggctctttgaaaaagggatttctttttgtgaccgtgcggctctctgcaaaaagattccatgcaacaggaatttcagcaaggggcgcttcacaaaaacaatccttcacgccggcaacacccacgtatctaatcaatctggaactggcgtgccatttttttcaaccaccagtcccggtgcctcatctcgtcccggctgcgttccagttcccgaagctcgctgccccgcatccctcccttcatgtagcgttcatccagcttgcgcgcctccgcacgggtatctttccgcagagctttataaaactgggcccccgtcaccagcccgccggctgcaccgctccgacccaccaggttcatgtaaagtttcttcagcctgttgtaatcctccaccacctggttatatttcaaagcggcgtactggtaacgctccttccagtcctccggccccggattgaccagacggtcatccagagaaccgggaaccggcgcggaagacggggatgccagccctccggaggataatggcgtaagcggtggaggctggggaacgggcctgcggcttgtcctgggaacaccgccgaccgtcacggaaaggggggagcgttcctccagcagagcgtccatgcgtgcctgttccaacgtttcccgcagatgggcacgttctttctgcagggacgcgttcaagtcgcgttcttctgaaagcgactgcttcagcgaccgcatgccgccggacatttccgagtaaaccagcgcataagccccgatgcaccccagcagaaagcccaggcccagcatgatgcccctttctcgccacgatccaggactgcgttccggagccggttccggaatgtccggttccggctcatgggaaacagtcaggtaatgttccagagggccctcgtcaggcatgggctgattcagggttgggacgggaaaaacgcaggttcaagcctgttcaggacggatgcagtccgcgccgaaatacggcacaagcgcctccggaatccggatggagccgtccggctgctggtaagtttccagaagggccacatacagccgcggcagagccgtgccggaaccgttcagggtgtggcagaactggttcttgccgtcggcatccttgtaacgcaggcgcatgcggcgcgcctggtagtccgtaaagcaggaacaggaagaaacttccagatactgcccctgtcccggagcccatacttcaatatcatacgtcttggcggaggaaaaaccgaggtctcccgtgcagagctcaatcacccggtaatgcagccccagtttttgaaggatggattccgcatggctgcggagcacttccagctcccggaaggagtcttccggctttaaaatctgcaccagttccaccttgtcaaactggtggacgcggatcataccgcggttgatgcggccagcgcttccggcttcccggcggaagcagggcgtatacgcggccatcttgatgggcaggtcgctttcctgtaaaatggtatcccggtacaggttggtgaccggcacttccgccgtgggaatcaggaacatctgctggtcttccgtgccgtacatgtcttcctcaaatttaggaagctggccggtgccttccatgcactcccttttcaccacaaaaggaacgcccacttcctgataaccgttttccacggtctgcgtattcagcaggaagttgatcagggcacgttccagacgggcacccgccccacggtacaccacaaaaccggagcccgtaatccgcgctccgtcttcaaaggaaatcatgcccagattcgcggccagttccacatggtccttcgggttttcaatagcgggcttttctccccaaagcttgatttccgggttggccgtttcatccgcacccacggggcattccaggtgcggcaggttgggaatgttcatcagcagggaggtgagccgggctgcattttcctccgcaacacggtccagttcccggatgcggtccccgatttcgcgcacgcgcgcttcaatggaggaagtgtcttcccctttcttcttgagcatgccgatctgcttggaggtggcattgcgctcggactgcagggcctgcttttccgtctcggcattgcggcgcgcttcatcgcaggccagaacgtcatcaacaagcttccacgcgtcgccgctgcggggcttcagccgcgctttcacttcttccggattttctcgtattacacggatgtcgagcataacgcgcacagcttgcactccatccccccgccacgcaagccaaatgaacggcctttcatggaaaaacgttaccctttcacggaaaaacgttgcgcgcagaggcatgctttcccgaatgccgcccctttccggaaactgccgtttttcccgtgtcagacaatgaattttttcccttcccaggaaaaccgtacagcagggggaccggactccccatatttccgggaatcatgaacatccggcgccagggtgcattgcaggaaagaccgggaaggaacttccccccggttccaacaggcggagttcctttcatcactatttgttcttgaagaatccgggcggctaaggatagtgtaagggcatcatgcaacaaaccgcacgcgccgctgtcctgacagcaccaaagacatttgaaatccgtgaatatcccattcccgccatcggagacgatgaaatgctgatcaaggtggaagcctgcggcgtttgcggaacggacggccacgaatacaaccgggaccccttcggcctctgccccgtggtcctgggccatgaaggcaccggggaaatcgtcgccatgggcaggaatatcactaaagacaccgcgggaaatcccgtagcgctgggggacaagatcgtcacctgcatcattccctgcggcacctgtgacgcctgcctgaatactccggcccgcaccaacctgtgcgaaaatgtgggcgtgtatggcctgatgcctgacgacgacgtgcatctgaacggctacttcggggagtacctcgtcatccgcaagggctccacatttttcaatgtttccggcatgacgctggaccagcgcattctggtggaacccgccgcagtggtggtccattccctggaacgcgccaagtcaaccgggctcctcaagttcaattccgtggtgctcgtgcagggctgcggccccatcggccttcttcaaatcgccacgctgcgcacgctgggcattgaaaccatcatcgctgtagacggcaatgactcccgcctggaactggccagggaaatgggagcctcccgcacgtataacttcacccggtacgcggatctgaacgaactgctggatgccgtgaaaaaggacaacggcggccgcctggcggacttcgtcttccagtgcacgggcgtaggcaaggccggggccaacgcctggaagttcgtgaagcgcggcggcggcctgtgcgaagtgggctttttcatggatggaggggaaagcgtcatcaaccaccattacgacctctgcaacaaggaggtgaccgccgtaggctcctgggtgtactccccgcaggactacccgaccacattcgactttctgaagcgagcctacggcatcggcctgccgctgaccaagctgatctcccaccgcttcaagctggatgaaatcgcggaagccctggaaaccaacgtccagatgaaaggcatcaagattgccgtcatctgcggctagccggaaaactttccatctctttccatgccgccgtttttcaaaaacggcggcttttttacgccatctttccccgtaaaaaaccactcagcctcccaaagattaattatcatcccaatccagaaaacggcccgtattgggaggacaggccatagcggaagcgattttttccttcaactgctccagtgcatcagggtcaagaaccatgggttcgctcgctttaaggcacaaacctttccggtacacctgcctttccaacgtcagatatttattgacgatgccattggaattcagggcggcgtcaacgacgaaatgcagcagataatcagcatctccaaggtaaaaatcaaactcataaatccaggaaaaacagtattcttcgtcctcttcgcaaatcatttccctggcaggaattccgtcatcatacagatgattgagttcccgcaacagggtcagaatatgctcacgcctccgcacggttacctggcatccctgctccccaaccatgccctgaaggcagtcgatgaccaaatcatcacactgttcttccatggcaaggagaacttcccggacctgcgcccactgtcgctccaatggttcctcggaatacataaaccgggcaaagggggaaggttcacctaccccagcgttccgtaatgccgccgtaggagtcaatgcggcggtcacggaaaaagggccagatgcggcggtggtcttccaatgcgtccaggtcaagatccgcgtacaggatggcttcatcgctgacgggagccttcgccataatctggccatagtagtccgccacaaaggactgcccccagaattcgctttccccttccgtccccacccggttgacggcgcagacatagcagccgttggctacggcatggccgcgctgtacggtttcccacgcgcagtgctgctgttcccccagcaggggcttttcctccggcagccagccgatggccgtggggtaaaaaatgatttccgccccctgcatggccgtcaggcgcgcggcttccgggtaccactgatcccagcagatgagcacgccgatgcggccgaatctggtgtcgaacgccttatagcccaggtcgccgggggtgaagtaaaatttttcttcaaacccgggatcctgcggaatatgcatcttgcggtacatgcccaggaacgaaccgtccgcatccaccacccaggcggtattgtggtaaagcccggtggcgcgcttttcaaagccggaggcaacaatcaccacgcccagttccgccgccagtttcctgtgggcttccgtcaattccccgggaacaggttccgccaggtcgaataaatcgcattcctccgtcctgcaaaagtattccgtggtaaaaagttcctgggtgcagacaatctgcgcgccgttggcggcggcttcacggatggcggattccgtcttttccttgttcacggaaggccgggcatctgcggacagttgaatgagtgcaattttcggcatgccccttccttaccccgtttcccttcccattccaagcagggaaaatgaacgcggcgcgattattttgtggaaaacggcccggaaagtgctatgaaattgcaatatggaacccgtcacccccactctgcccgacgacgacgtagccgccattgaccggctcggcgccatttacaaggagctttcctcggaattgagcaaaatgatcattggccagcagcgcgtcgtggagctgctgagcatcgccctgttttcccgcgggcatgccctcctgatgggagttccgggcctggcgaagacgctgctggtcagttccgtggcaaaaacgctggaccttagtttcaaccgcatccagttcacgccggacctgatgcccgcagacattaccggcacggacatcatccaggatgattccgccggcggcaagcgccagttcgagttcatcagggggcccgtgttcgccaacatcgtgctggcggacgaaatcaaccgcgcccccgccaaaacccagtccgccctgctggaggccatgcaggagcgccgcgtcaccgtcatgggccgcaccttcaccctgctccccccctttttcgtgcttgccacccaaaaccccattgaacaggaaggcacctaccccctgccggaagcccagctggaccgcttcatgttcctgattgaagtggactaccccacggaggaggaggaaatgcgcatcgcccgggaaaccaccggaacccggagcgaggaactcaagcacatcctctccggggaggaaatcatcttttaccaggatctggtgcgccgcgttcccgttccggaacatatttacgagtatgccgtgaaactggtgcgcgccacccgccccaccctggaaacttccccggaatgggtaaagcagtatgtagcctggggcgcaggcccccgcgccgtccagttcctgattcttggggccaagacccgcgccgctctccagggcagctacatcgtccgcagggaagacatagacgccattgtggaacctgtgctgatgcaccgcgtggtcaccaacttcgccgcggaatcccagggcatcacgccccgtaaggccgtggcgcgcctggcggcggaaatctgaccgccgtcccggcatcatcaatcccctttccctgccctatgaaatacctgaatcacaacctgctcagccgcctggggaaccttcccctggaagcgcgccacagcatgacggggaacgtatccggccgccacagaagcgccagccgcggctcctccgtggagtttgcggaataccgcaaatacgtggcaggagacgatacgcgccgtctggactggaaagcgtatgcacggtcggacaggtattacatcaaggagtttgaagcggataccaacctgcgcgcctacatcgtcatggatctttccggctccatgaattatcatccggagcaggtggaaaccaagtatatgcgcgcgtgcaggctggcggccaacctggcttacattgccatccggcagggagacgcggtgggactgagttttgcccgacagacgaaggacggcgccgcgctgcacatccccgcctcccgccgccccgcccacctgaacgtgctcatcagccagatggacacgcattacccgcagggggagaccgtccttcccgataccctgcatgaactggcggaacgcgtcggccgccgcgccctggtgttgattttctcagacctgttcacagatacggcggagcttaaaaacgccctccgccacctccatttccgcaagcatgacgtagccgtattccatctggtggaccagttggaaatagattttgactttgaccgccccatccgcttcgtggacatggaaggcggcggctccctgattacggagccggaccttatcgcggacgagtaccgggctatcgtggccagctatctggaagaaacgcgccggatctgcacggatatcaatgcggactaccgcctggtcagaaccggagattccctggaagacgtgctgaccggcttcctgatgggacgtcagaaaaagaaggcggccggataaatgcccggctgtctcacggaacggttgattgctccgcggaacggatgcaggatgcacccggacgctccccggattgcaggaagcgtctgtttttcatctctttcccttttttccattgtggatgcacccgttaaaatgatcgtgggcctgggcaacccgggcagaacctatgaagacacccgccataacgcggggttcatggtgcttgaccgcctggccgcccggtggggggccgtattcaaggcggacaggcagcgcaagtgcgaggtggccgccggccccggcgtcctgctggtgaaaccctccacgttcatgaatgaatccggtctgtgcgtgggccccatgatgcggtttttcaaactggatccccgcagcgtgttcgtcattcatgatgaagtggatttccccctgggcgtgatcaagctgcgggaaaaaggctccgcaggcggccacaacggcattaaatccctcatcgcccacatgggcacccaggaattcccgcgcctccgcttcggcatcggccagccccgtggcaaaggggaaatgatagggcacgtgctgggcaaattccgcccggaggaacgcgagcttctggacgtgacgcttggcaaggcggaggacgccgtgctgtacaccatggaacacggcattaccagggcaggcaatattttcaacgctgttccaggctgacagccgcatgaaaggccgtcccatttgcgctatgacgcatccctggacgggccggagagcgtttttgcctgaagacggagcagcccgggctgcaggatgatacggctgcctcaggcgcccggcggcgtccaggaatactcagggggcgcgcatgccttcttttttcgcccgcccgccatgtacggtattgctaaacaaacgggaatccgttaggatttttgcaccttttcccctctcctcaggatcaatcctgcttcatcttcatggctgaattaagttcacaagctccccgcaggcacatgcaggccaacaaaaggcggcatcccaaggcaaagcccaggaaacgattctggagctttatccgaaagctggtcctgtggtgcctggtgatggcggctatcggcgcggccgtgggatacttcggattcatgatggcctggaaacgttatgacaactgggcggcggaatttgatctggaacgtatcaatgacctggaaaaacccagcattatttatgaccggaacggggaggaaataggccgtatttatgtggagaaccgcagctacgtcacgctggacaaaatctcccccgccatgattaatgcgctgattgcccaggaagattcccgcttccgggaacatccgggctatgacttcctggggattctgcgggcaggccgggagtatatccacaacagcggggacgccaaccagggcgcctcctccatcacccagcagcttgccagaaatgcgtatgacctgaaaaaccgtgccaaagccaggaatgagggcagctttggccgcaaattcgtggaaatagcgctggcgcgccgcatcacggaacggtacagcaaggaccaggttctggaattttacctgaaccgcgtttacttcggcagcgggttttacggcatccgcgccgcttccctgggctacttcggcaaagagccggcggacctgaccacccgggaggccgcctccatcgccgccctgatcaaaaacccgaacggactttcccccctgaataatccggctagcaatctgaaatggcgcaaccacgtgctcaaccgcatggccaaggagaaatacattacgccggatgaagcggaacgcctctccgccatggagctggggctgaatcccaagccgctgaaacgcggcgtctcccacatttacgaccgcatttcctcagaaatcaccgcatacctgggagaggagcgcgtcaatgccgccggacttaaaatttacaccaccattgacagacagcttcaggaagttaccggaaaagccctggaacaggctctggaaaacattgaaaaacagcccggttaccgtcatcagaaagccgcagactaccacagcggttccgcgaacaagccgcgctatctggaaggagcgctgctggtggtggacaacaaatcaggcgccgtcctggcctaccacggaggcagggattacaccaagcgccaatatgacgccatcagggacggagcccgccccaccggcaccgccatcctccctttcctgtacgctacagcctttgacacgggaaaaagccccgtcacccgcattctggacgatgccatcgacaaccgcctgacgggcatcggcggttcggaaggaatcctgggggaatggggggcggaaaactccaaaaaccgttatgaaggcatgattaccgcccaccgcggcctgtccgcctccaaaatcgccgcatccctgcgcatggggatggagatgggcacggccccgttcgtcaagaagctgacggatttcggcatccgcaagcccgtgagggaagcgggcagcacggaaataaatcccgtttaccgccccaaaattttcgtgggcacggagcctgcctccctgaaggaaatgacattggcctacaccgccatcccgaacgggggttcccgccctcaggatatttactatctggacaggatagaagatgaagacggccagctgatctgggaatccacccaggcgattgaaacccggaacaatgcccaggtacggaagggggccacatccacagccacggctttccagcttcacaacatcctgaattcctccctgaaaaacggttcagcccagcgcgttgccccgcatctgccgaaaaacttcaagggcggcgtgaaaacaggcaccacgtacgacttcgcggacaactggctgtttgggtatgacagccgcattacctgcggcatctggataggtttcctggaaggcaaaaagcccatttatcacggagccttctcgtcagacacctgcgcttccgtgctgggcgccgccatcacggaagcggaacggcagttccctgccggagaactggcccctccccccagcgtagagcgggtggaaatctgcctgaccaccgggaagagggccacgcacagctgttatgacattgacccgtcggataaaaaataccgccgccacaccatattcgaatacctccgcaaaggggattccagcctgcctttctgcgacctccacggggaggacgtctccgcacccgtctccaccttcacggcccagaaccgcattcttcccctgccgcccatcctgcccaccaggcccatcctccagggggacgatccctaccatacggagctgaaccaggtcccggccaaccgcaactttgaactgctgggggctggcgaaaacgtgccggaagcgcaagccatttccgcagatcccgtctctccggatcatacggatacaagcattacgctgccggcgcccaggcccatcaccattcccgtgccggaattcatccacctgtaactttttcccctcatgccttccccatcccaggacacggtagcctgcacatgcccgtcatgcggcaacctctttgccgtgaaggcgtcttttctgggacgccaggtaaaatgccccatctgcaccgcttcagtaacagccaggcaggaagaaaagcccaggccggaaacggaagaacaggacgccgtcccctgcctctgccatgtttgcggcaatccctttgccgtcagggccgcctgcgtaggaagccgtgtgcaatgccccgtctgccactccgccgtcacggccgtcaaacaggaagaagcactttcaacattcccgggccggacgcctgaagttgcagagaaagcgcccggaaatccgaaacaaccggctattccgccatctgccgccggtgttccgcacacttccgcgtactccgctccgcatacaccgctcgcaccaaagaaaaagacggacagacggaccatttccgttcacgggcctaccactccgggccccaataaatccacgacaaaaatccgtaaaaggaaagagggaaacgccgctccggccatttccgcgccacgctgcgccgccctggccccggaagaaccggaataccgcactgccgccgcggatcccatgcgcagcgaacgccggcccacttggcatatatggctttttgtcgcgggactggttctttcccttctgggcgtgttcatgttcctgcgcgggagggatatggaagcggaaaactccaaacttctgaatatctcagaccggtttgtggatcatgaagcgctcttttcacaggaagtgaataaagacctgctggagcaattgcagcagagggagcggcaataccggctcatagcccacagccgcagggaggaagaccggaaggcggaatccatttccccccatatcacggcggccatgaatgaactggccctttactgcatggcggaatcggatgaagagaggctcaactacgtgatgaatcccgcagccgtagctcccaaaatggcctcttgggcctcctacggccaatacaaggactacctgccccaggaagcgggcagaagctccaaaaacggggacctgctccaaatcaccgtgctgatggacgacaacactatccgcccggcggttttcctgtatgaccggaattcaggaaaatggaagctggactgggaagcctgggagggctattcccccatgctcccggcggagctggaagccaaaaagccctccacccccgttcccgtcagaatcatcctaagcatgtccggcatttatcagccccctttcctggaggaatcctccgcggaaagctaccgcaacacgtcttatctcaacttcacccttgagttccccaacggggaacgcctgaatgcgtacgtggacaggtattccccgctggccctggaactgaccaggctgctttacaacggccccgtgcgcacctgcgtgctcatccgctatccggaagacctgcccggcaaccgggccgttattattgaccagcttctgcactccggctggatgagcaacgccacccgcaggcttcttcccaccaataattgaaaatcaaaaatcggttcccgctttccatgagttccaaagcactagcgcaaacacaggacaaagccctccaactcaacctggcttccaccatttacggcacctttgcggaaatcggagccggacaggaaacggccaactggtttttccgggcatccggagccgccggaacagtggccaaaaccatttccgcttatgacatgaccgtcagcgataccctgtacgggccggtcaagcgctacgtttctgaagaacgcctgaaaggcatgctggactacgaatttacccagctcgtcaaccgcctgggcccccagcgcggcaaagacacccgcttctttgccttctgcaatacggtaaaagtcaaaggctaccgggacaacggcccctggcacggctggataggggtgcgcttccagctgaaaccggaggcaaaaccgtccgacctgattatccacgtccgcctgaacgacccggaccacgaccgccagatgaaggacctgggcatcctgggcgtcaacatcctgcacgccgtctttttcaaaagggaccgtctggaggaattcattgaatccctggtggacaatctggatccccggctggtggaaatagatgtcgtccgttttgaaggccacggtttttccatggtggacaaccgccttttcgcgctccagctcgtccagtccggcctgacgccggccaccctgttcctggcgaacggccaggtggcccaggcggcggatgtgctgtacaagcgccccatcgtgctgatgaggggcagtttcaaccccgtctgcaatctgcatctggaagtcatggcccaggtgaaaaaaaccttcctctcccacatcaatgagacgcaggcggaccgctgcatggaaatttgtgaaatatccatgaacaacctgctccgcggcgatgatgtgcaccatctggaattcctggacagggcggacagcctcaaggctctcggcaaaaacgtgctgattaccaaaatggcccgtttcgacaacctgtccgggctgctggcgcgctacacgagagaacccattgccatcgccctctccatcggcctgctgaatgagctgttcaaggaaaaatggacggaggacattcccggaggcattctggaatccttcggccgcaccttccagaacaaaacgcgcctgtacgtctccccgtggctcaaccgcaaatccggggaattcgtcacggcacgcactttccgcgcgccggaacaatacgtgcacctgtaccagcacttcctggcgaacggcctggtggtggacgtgccctttttcaatgaattcctgctgcgccacacgccgcgggacatccagcgcatgatcgctgcggatgaagacatctggaaaacgctggttccggaggaagcgcaccgttccgccctccacttccgctgagttccttttcagcaggccgccccttcctccccgcggcacggccctcccaatgccgcggtttcttcgtccccgaaaccggataatacggcacggcccctcccgcctgccctgccgggcttcccgccactggtcaggaaaacttaacaattccgtaagattgtcttgccataaggcaggaatctcattaaggtctccgagttccatttttatcatgaataccattattatcggctcccaatggggcgacgaaggcaagggcaaaatgatcgatttcctgacggaatccgccgacgtggtggcacgcggccagggcggcaacaacgccggccatactgtaattgccaatggaaagaaatatattctccacctggttccctccggcatcctgtggccggacaagctttgcgtcatcggtaatggtgtggtgctggaccccatcggcctggtggaggaaatcaatgaactccgcggccagggcgtgaccattacaaaagacaaccttctcatctccgaccgcgcccacgtggtccttcccttccacaaggaaatggacgccgcccaggaatccgccctcggcaaaaaagccatcggcaccaccaagcgcggcatcggccccacttacgcggacaaggcgcgccgcatcggcgtgcgcatggcggatatgagggatcccgcgatttttgacgaagtgctgcgccgccgcatcaagatggcgaatgcggaaatggaacgcatgggccttcccgctatggatgaagaaaaaatggtggcggaagtaagcaccgccgcggatgtgctgcgcccccacatcaccaacaccattccggttatgcacgaagccgtggcctccggaaaaagcattctctttgaaggggcccagggagcttacctggatgtggacttcggaacctatccgttcgtcacctcctccaacacctcttccgctggcgcctgcaccggcacgggtgttcctccgcacaaaattgaccgcatcatcggcgtctgcaaggcctacaccacccgcgtgggcgcaggccccttcgtcacggaggatgaagacatctccaaccatctgcacagcatgggccgcgaattcggcgccaccacgggccgcccccgccgttgcggctgggctgacggcgtgctgctgcgcttctccgccatgttcaacggttttgatgaaatggccatgaccaacctggacggctacgacaagtgccgggaaattaaaatctgcacgggttacgatctggacggggaaatcctggcttatccgcccgccacagtggatgaatgggaacgctgcaagcccgtgtatgaaacggtgcccggctggatgcaggacatttcctcctgccgttcctgggaagagattccggaacaggccaagaaattcgtcaaacgcatgagcgagctcatcggctgccccgtcacaaccgtgggcgtaggccccgaccgcgaacagacgattgccgtgcaataaacctcggcagttctcgttattatttccttcaaagcagttccgcatgcatggcggaactgcttttttattgtcagctaataaaggccgaacacacgtttcaacgctttctccgccaccgtttctccacggcagcggcatgggaaaaacttattttccaccctgcatctttgcatgaagcgcggaaatgcctcctctaaaacacatgaaaacggcaattttgccgcttccaggtcaggaaaaagcaaataaatatcatccaaaacagcccggcggaactggtgaagctgccgttggaaagcccatgcctgggagttcccggaatgatttgacggacggatacttccctcctgatgataataaaagaggaggcgggatctttcccgcctcctgtaaaacagcaattggactccccggctcaggcacgtctgcggcgcatcatgagggcagccagaccaatcaggctgagggatgccgtagccggttcgggaacggcagccgccgcaatggcattaagattggcttcctgggaagcattagcctgcaacgtggtattatccacgacaaggtatttgacgtaatccgtgccataggtaaatgaagtcagggctccgaacccgctcgctttcaaccctgaatcctgccctccataagtggtggcggttccttcggaatcaaccagggtcaggtaagtccaggttccggtgctggtaatctgataagtgatggcggcggattcatagctgttttcggtgaacaattccttcaatcccgtattcaaattgagtgaagaaccgttgacagaagtaatcgtgcggttgtagttctctccttgccaggaaccataaatgcccgccgtgggagttcctgaagaaacgtagttgaggcccaggccgatcatattattattggcggaaaaaatattcgccttgacgttacctgccaggatggcgtcttggaaagcctgagcgtccagggccatggtcacggagaaattgccgtaaccggagtttataccttccgtcagggtatatgacccgcccgctgcctgcaatgcactggaatccaaagtaaggacggttgcaccctgaaccatgaaggaagaagctactacacaagaaatcaaaaataatgttttcttcatttggctgttctaggttgaaaagaaaagagcgacgcgctctccctgtgcggcacatataggggttttagaatccgggaacaataacaaatattgaaactcaacgcataatccatcttaatcagttgttttttaataccatatacaatctctggtctttttctatttcatcttatccgaatacaggtaaatgcgttatgagaagggaaaaatatttaagtgcgcagcggattctaaattcgcgagaaaacttacagagaaactctgatgctttttcccgttttacactccttttggctccctcacccgacgtacattcggacagtcccccctgcaaacaatatcaccctaagcttccatgttccaactggttcctcttcttttacggaaggaatacggcgatgggagctgcccttccgcttgccccatcatgcctgtcttaggaaaaggcccctgaaggacagcccgcctttcctttttccggaaagacggtggaaaacggatattcgtgtcagcatttaaacggagttatgatacttccgggaaaagccttgtctgactgtctgtatgagacatgccattcttccctccatgtgcgctgttgccgtcgcggcttcctgcagtcccgtccttgcccaacaggcggctcccgctgcggcggcttcccctgcttacctgaacacggaacgcggtctgcgcgtgaaaactctggaaggcaaggaaataagccccagcctgatgaaaggaatgcgcccggaagaacaaatcaccaaaaggacgcccggcgttcccaccaggcccagcgtactgcttcagcacgaaggcggaacatccgctcccggtctggaatggtttgcggccaggcctcttaaaatgatgccgtacctggacagttcctacgttttcggcaatacctgtgcggaaccgaacgcctggatacgcgaagacatgatttccaccggagcgcagaagctcaagaccgctctctccagatacggcattacttattccgctcagttcggattcaactacacggggctgacgggcggcggtctgaacggaaaaacggatttcccctcctacaatggttccctgctgaccaatatcaccatcttccgcaatcattccacgggcagcggcctgtacctggcctccgagttcgacttcggcaacggctttgacttcaatgaaggcagtaaaggccccaaaaccacgctgggctccctccagaaccccaccagctccttccagggcccggacccccacctgagcaacctgagcctggcatgggtgggagcgggaggaaagcttctgctgatggcgggccagctggacaccaccaactacatgcaccacaacgcttacgccaattcccataacaataacctcaccaacagcgttttcggcaataatcccgtactccccctgacggataattccctgggattccatttcgcgtggcagccaaccacctccttttacgtgatgggagccactgccgccaataacatggctcaaaaccacaatcctttccggaacctgaattccgacaattggacgaacgtgcttgaattcggctacgtggcggaagatttttgcagcatgggccccggcgtgtaccgcctccagccctttttcaccaccagcaacggtgaaaacgggggcggcgtggccgtaaacttccagcagcagctgggccgcagcagccacctggggtggttcttccgcggcggctgggcaagcgatgacgcagccacgctgaccggcgtacgctgcgcggccaccacagggctggtgcttctttcccccttccggggaaagggcgcatccaatgacggatacctgggcctcggtttcctctggcagcagggggctaaaaagaacggcccgtacgtgaacaggaatgaatacggcattgaattgacgtacgtggcccaggtgacgcccaccatgacgctccagcccgatattcagcttgtcaagaatcccgtcaacggccgcagagggcaaacggcggtggttttccagatccagaacgtctggtcctggtagaagcccttccggaaaactggaaaatattgatcgcatttcccggaaatcctgtctaaatggaaatgttcttatttggaccacgcacatgaagcgcattcagcaaccttccatgcaggaggcggagcaggcctccctgaatcatgagattttaaatacatggcgtcccggggaaactctgggggaacacatggagcgccgcggcgtcagccggcgcgaattcaacaagtggtgcctgaaaatgatctccctgatgggtgttgccactgtaacgggcggcatttccaacgcccaggagattgcggacaagatggccgcattgaaacgtcccgtagtcatctggctccagcttcaggaatgcaccggttgcctggaaagcactatccgcagctataacgaagaaatcggggacatggtgctttccgccgtctccatgccttacgtggaactgctgatggccccttcaggagaggccgccaaccaggctctggaagacgcgatcagggagccccacatcctcgtcatcaacggttccgttccggtcaatgacggcggggtgtactgcaccgtggccggagataccgtggagaacatgctgcgccattgcgcggaaaacgcctcccatatcctggccgtgggttcgtgcgcgtacttcggctccatccaggccgcccgtcccaaccccaccggggccgtgggcatccgggatatcctgacggaccgcacggtcatcaacgtgcccggctgcccgcccatcggggacgtgattacggccgtcatcatgtacatccttacatttgaccgcgccccggaatgcgacctggagtcgcgcccgctgatggcatacggcacccgcatccacaataattgcccgcgccgcgcccatttcgacgccggacagttcgtcaacgtgtttgacgacgagaacgcgcgggaatgcttctgcctgtacaaggtgggctgcaagggcccggatacgttctctccctgccccatcgtcaaatggaatggcggcgtcagcttccccatccagtccggccacccgtgcatcggctgtacggagctgtacttctttgaccgcatgactccgttttacaagacgctgccgaacgtgaacggcttcggcgtggaagcctccgccaacatcatcggggctgtgggcgtagccggcgccggagcggcaatcgccgcccatgccgtgggttctgccattcattacaggaagcagcacatgaaggaggaagcaaacgtctccctgcccgccttcggggacgctcccggctcgcccgacaaggaaattgaagaatagccagaagccctcaccaccagattaccatgagcaattacacatcagcggacgttccggaatccagccgggtggtcattgacccggtgacgcgcatcgaaggccacctgcgggtggaaatggaggccggggacggcgtcatcaaaaatgcctggacgtccaccacgcagtaccgcggcattgaggtgatcgcctgcaagcgggatccccgggacgtttgggcttttgtggaacgcatctgcggcgtctgcacgggtacgcacgccatcgcggccctggctgcggtggaagacgcgctccagtacccggtgcccgtccaggcccgcctcatgcgcgacctggtcagcggagccctgggcatccaggaccacgtcatccatttttaccagctccaggccatggactgggtggacgtgatgtccgccctgaaggcggatcccgcggaaaccgccgccatcgccaagtccctttctgactggcccctgtcctccgccgcgtatttcgccggagtgcagaagaagctgaaggactccatcgcctacgggcagtattccatctttacgaacggctactggggccatccggcctacaagctgccgccggaggtgaatctgctgggcgtggcgcattatctccaggccctggtctggcagcgggacatgatcaaaatccacaccatcctgggcggcaagaacccgcacccgaacttcctggtcggcggcatggcctgcgccatcaacatgaacaatgaccaggccatcaaccagttttccctgagctacctgaagcagctggtgcaaacctgccacgatttcattcacaaagtatattatccggacattgtagccatcgccggattttataaggactacgcccacattggcgcgtccaaccccaactttttctgcaccggggctccgtctgaaatcaacacgggcgcccccgccggcaaaggcatgatcaagcccggcgtgcttctgaatggggattacaggaacgtgcttccctttgaccaggacaagatcagggaattcgtcaccagctcctggtacaggtatacggaaggcagggacgcgggcctggctccgtatgacggggagacgaatgcggactacaacggccccaggccgccctacaagtggctttccgaccacccgcagtacacctgggtgaaagccccgcgctatgacggccacgcgatggccgtgggtccgaacgcccgcatgatgattggctacgcccaaggggttcccgccatcgtggaacgggtggatgccgcctgcgacaagctgggactgccgcgcgacaacgccttcatgaactccacgctgggccgcgtgtacggccgtgcgctggacgccctgatcaacgtggacatgatggtggaccagctccaggaaatgacggaccgcatcaggaacggggaaacctccaccttcaacccggaaaaatgggaaccggaaacctggccctcctcctgtaagggcgtgggctgggtggaagcgccccgcggcagcctgagccactgggtgcggattgaaaacggccagacggtgaattaccaggccgtagtccccagtacatggaacagttccggacgggacgcggcggggcagatggggccatatgaatattccctggcccataccggaaaacacccgctggtggacccctcccgcccggtggagcccctgcgcaccattcacagctatgacccgtgccaatcctgcgccgtccatttgtttgacgaagaaggggaggccattctgaccagacaggacccgtgaaaacgactcttatcgataacgacctcaccctggcggtggaggatgccattccggccagtccggtgtatgctccggaagaaatcctggctctggccgtgtgcgcctcccccaacggcagcagggacgcgggagacctggccctgctccatgccgcgcgtgaacgcggcataaccctcccttacgcccagcgggaaaactcctgggaggctccctcccgggaaaggccgtacagcacggctgttctgaaagccgcagacaagacggacgcctcccctttcatggtagcccgcggcaatctgaaggcgctggaaaaactgtgcgaagtcagctccctggaaaaggagcgcatgaacaaggcctttgaagagcattccccctccggctttgaacccgtggccgtggccgtccaccggtccggcgcgccgtggcgcctgttgggcgtcgtgcccatgcacgccatgagggacgtgcgccgcctctccatggccaaggccaatttccgctatttccacgtctgggactggcctctgcgcgtgctgcactggacgtgggtgctctgcatcatcggcctgtccgccacaggcatctgcatcgcggaagggtggttcctgaaaatgggggatctgcacggggctttccaattcggaacgctccgcttcgtgcattacgcgctggggtggatcctggtggtggtgatgatgctgcgtttttcctgcttcttcatggcctccaacaaataccagagtttccgggccctgttccccgtttccagacaggagtggaaggatttgtacgccacagcggtggactacctgttcgcccgcagttatgacggcccccgctacatcggccacaatcccctgcagcagtggacatacacgggcgtgtacgtcctgttcaccaccatggtggtgaccgggctggccctgtatgccctgtatgagccgcgccactggttctaccgttggttcatgccgctgaacgacctgataggcattccgtacgtgcgcctggtgcatctgatcggcatgtggtgcttcatcatcttcgccatgatccacgtgtacctttccatcctttccgggaacgtggatcgggacggcaccatctcctccatgttcagcggcggacgatggctgcgcaagggcgtcaaattccgggatgaataacctctctgccctccccttgacatgaaattggagccatacacggaagaactgcggggctgccccgtgaagggaaatgcctatcccgtgctcgtgctgggcatcggaaacccgcttatgggggacgacggcgcaggcgtggagctggcccaccgcctccaggaacgggactacggcccgctggtccacgtggaggaagggggaacgcagggcatgaccctgcttcccctgctggaagatgcggacacgctcatcctgctggacgccgtcaggacgggggccctgccgggaaccgtcgtcacgcgcagccgggaagaactgccgcgccacttttcccgcgttatgtctccccaccagataggcatgaaggaagtgctgggggcggcccagctgtgcggcaccctgccgcgcgccatcacgctggtgggagtggaggccctgcatacggatttctgccgccccatgtccgcggaggtgcaggaagccttgccgaaggcgctggacacggcggaggccctcatcgcccgcgccctggcggaacatcaggcccggaaaaacgcccatgcatgaagtaggcatcatggaaggcgcgctggacatggcccggcggcttatggaaaaacgcggaggaaacaggctgaggcgcgtgcacatgaccatcggcagcctgagcggcgtggtgccggaagcccttcaatccgccttcctggccctgaaagactcgtatgcggcgcaggatgcagccctggacgtcgcctgggtggaggccgtgtgccgctgtgacgcatgccgggcggatttttcctttacggaacacggctacatctgccccggctgcggagaaccggccctggccatcctgcgcgggcgggaactggagctgacccgtgtggagtgggaatgaacagtgcccctttcgggaaaaataagggaaattgacgcgaacactttccccggacggatggtctaatatcattggagcgcatccatcgcgcctcaaacgtcaaaccaactatgtaaccagagccatgagcaatatcaacccattcattctaacagggatgatgccgctttcagcctcatccatgaaccgtgtctcctacatgtgcccggtcaccatcagcaatgatgtagtgcagggccagacggacattcaggattcccttaccgttgattccggcggaaatctttacatcatcaacgctcctgtttacgtgggcggccccaaccagccggaccacgggcaccgcaccgcccacctcgtcatcaggaacggaggtgccatgacgctcctgggcaatctgccggaccatatgaccgttttcctgggggacaaagccaacggcagcctggaaatcaacggcggccgccttctgatgggccaggggcgcattcagggcgccagggagcatgaaggcagaatcgccatgacggacggctggctcttcgcctcggaagtggatctgccggcggagggctcggaactcgtgatcaggcacggcctgatgcgtatcagaaaactctccggcaatgcatccacccgcatttacggaggcgttctgcacgtaaaggaggaagcccgcgccagccgcatccatctgatagacgacggcgtgctgctgctgggcagcgtcaccagccagccttccgcggacgtcatggccggagcgggcatcaacttccgcggggacggcggagcgctggtaatccgcatcccccacccggaaaacgctctgacgcgcacgcgggaagcggaacatgtctttgacgaactgctccggaggggcaagctctttcatgacagtgaacccatgaccagcttccaggggttccatatgagggagttcacggggcatgacggactggcgtacgccgcgctgcgtccctccgcccagctggacgcggaacagaatcaggttacccgcctgctccatacgttcatgtacggcggcagtgaaaaggacatgcccatctgaacccctccggcaaatggaaagccctcatcaaaaaaccgccggcattccgcgccggcggttttttcatctgttgatctgctgaaaaacggaaaaacgttatttcaggaatttaatcgtgaagggagccacataatcgtaattcccgttcgccgccttgacggcagcgataatggagaaaacgatccaggcgatgaccaccacgggggcgagcacgaacccgatcaggatcaaacatgaaagacaggccgcaaccgtataaatcgcccaggaaatctgggcattcagaatattctttcctactttgtccaccagagggttggcatccttccagaccagccagcagatcaggggcggaataatgttcacgccggcggagcctccgaaaaagacggacaccagcggagaaaccgccgtcaggatagcctgcgttttatccgattgtttctcaggtgcgggctcctgaaccggttcctggatgatttgttgttcttcgtccataaaaataaagagatggaaagcggatgaaggagaacggaaaccttttccgtttcattccgccttgatgagaccttttttacatattccgccccgtagtcaagcttccagaccgtccgtcccctgaataaaaaacgttctccagcaatcatccttgcctccacgcaggccggaagccatactgccgggcatgaccaatgccctgacgctgctcgtcttctccgcctgtctgggagcctgcgccccgggaataccggaaatcccgcctcccgcttcttccgtcacccgtcgtgaaaccctggcagccagccgggcctatacctccatgatttggaggggctctctccggaatgtccgccacggaacggacggggacggcatccggacagacacgccggacgcctccgcagccggatatgatgccggagcatggtggaagccgggcatgcgttccatcggcatgccgtacaaatggggcggcttcgacaccccgcggcagttttccgaacgcctgaaggcggatgccgccaacggagggcttcccgccgcggccggagacatgggcaccccggaaaagcaggccgcgggagacgccgccgtcagccgctttgccgccggagtggactgctccggcttcgtctcccgctgctggcggctggacaggcccttttccacacgggaactccccgccctctgcacgcggcttccctcctgggaagacctccggacgggagacatcctgattgtgccggggcgccatgtgctcctgttcattcagtgggagggtacggaaaagagcaggttcctgggcagtgaagccggccccctgccggcctggaaatgttcggagcatgtgttcagccgctccatgctggaaaacagcggttaccgccccatgagatacaggggcatgcgggactgaaaacaagttccggaacatccgtgaccctctttctttcccggaacaggaataagggggaagacatcgggaaacattccggaagttttcctctccccccttccataaaaagaaacccggcatcccatgcggcagggatgccgggctgcaggccgctccgtcaaaggcggcggcctggccaaatgccgggaattacaacggctgtacgttcatatggaacaccttcccctggaaggaggagccaagttccttcagaggcagaatgaatgtggaacggtgaactttgggacgatgcttgaatttgtccgaaaaatccttggacttgtcggaaaaattcttcagcacggcagttccggcaggttccccgtcaagcaacaggctggttttctccggttctcccacaatttccaccttgaccttcttgcctacgggaagcttggcgccgaaggaaaattccagagaatcgtcacggcggaatccgacggtgccgtccttcatgaccgcaagcaattcgccctcaggcgcagcaagcaacacctgctccttcccttccggagcggcagtcaattccagttccatggtcaggcggtaattcggccccagggcaggtttgtccagcttctgggggagggaggaaggttccaccgtaaagggctggctgtctttccatttgtgcaggggattggtgcgcggagcgttgccgatggaggaaaccagctcgcgatgctgttcaaacgtatccggagccttggcggttccccacagtttctggctgagcacgtccatggaaccggaaatgatcccccaaatgtcataaggcgcgtaccccgtatgcataatgtccgtttcatcattccagacggcgaaggtgcccccaaggagctggggatgcccggaaggcagcgtttcattgccgatgcggttgggaatccagttattgtacagccccttatggtttctgtccatccggtagtagccggcaaagggaacgatataaagggctccatcgttcgtattgatcacatcatagccctggttgacggcttcccatgctttcatccagccggtgctccaaaggttcatctggacccctttgctgactaccggggtcttgcccggcttggcgctgaggcttccccagatgcggggcgtataaccgcgcttgagggcatggctgagcacggcgtttgcaaagtggcggtaatcttccttgtccccataaaattcatccgcccccacatgcaccacgccgcagtccgcgaacacgggacggcccaacttgggatccttcagcatgtattcgtcaaaaaccttgctcaccaggtcgatcgtttccgggttggcggcgtccagcatctcgcagcggcgcttctcatgattcatgggccctttataaatgagatcaggccgcaggcgcgtaaaggaaagggcatgccccggcgtgtcgaactccggaacaatattgacgccgtactttctggcatagctgaccaggtcggcaaattccttcttggtataaaaaagatccctggctgtcaggggcgttccgtcctttcccttcattttggattccaggcggaaagccgcatagctttccttgaacggatcatggccgttgtccacatagtgttcgtggaaaatatagttgttgttgatgaccaggtgcaggtcattcatcttgtaccaggccatggtgcggatcacgtccttcaggtaactgagggggtaaggcgtgcgcgcgacatcaagcatgaacccgcggagctggtagcgcggaaaatccacggccgtgccgcagggcacgctgccgggcgtctggcggagcatctgcagcagggtgcgcgtgccccagaacaggccggtgggagccgccgctccaaggcggacgccgtccctggcaatctggagccggtatccttccctgcccagattgccgcccttcaacagggaaagggaaatatccgccttcgccccgggggcgacaagcttgaccttcttccccagcacgtcttccatatccgccgcaaacaatttgcccagctccttgtccgggcatgctatggtgaccgtattccccagcttatattctccctgtccccccttccattgcaggatttccgggatgatccgcggtttggggttgccctgggcggcctgaggagcctgcagcatgatttcataatccttgctgacggcttccttgccgtccttggtcaccttgaagctgacgttgacgggggtatctgaaataacaggggctatcttgcctttgctgttgacgagctgctcatagtcggcccccagcaatttaatctgggctccggaaacgctcggcatgggcagttgcttcgctccggctttcaccggagggatggaaagggaatccgcaatctgcttggcgtcctgccccatcacgggagacgcggcaagaacggcaatcatcaggaataggtttttcttcatgttttagtcttgtttaggaaaaggaaatgtctggtttgctccaaaaactacgcgcccgccgtccctttcttgcagagaaagggagaaaagcggaagaattctccctctctcaaccgggcgggacggacattccgcccaaacggattgccgcgcgccgggcttcatgaaggaaaaccgccggccaagagaggctttccctcctgttccagtaaattattatcccaaagaacccgttgttggcgagataaaaaacgtggagccccgggctgcggataaaaaagatgccgcacggcggcaaaacgtccccccacggcagaaaacgggaaccggccgtccctatcagggcggccggttccggacaaaaaataaaatcaggcgcggatatcaatcacctctccggcgggaaagcgcaccttggcctcgcgggcataagcgtcatccttggcgcggtagcccagagccactcccaccacagagcggtacggcgtaccgtccaggcccaggatttcatcatacttggcgcggtccatgccgccgatcgtgcaggaatccacccgcagggcggcggcggcgctgagcaggaaccccacggcaatgtacacctggcaatccagccaggcatgcattttttccggagccagagcctccacgtagctggtataaaaatcggcggaggaagccagtttttcagcggaggggcggcgcgtgaattcaatctgggccaggtaacggtccacatcccgcctggtggcgtcgcgccgggagcacagcaccacgtaatgggaacagtcctccacctgggactggttccaggaaacctcccgcaggcgagccttcagttccctgttggtcacgacgacaaacttccagagctgaagccccagggaggagggactgagacgcaggctttccgccagcgcatgccaggtgggctgttcaagacgggcttcaggatcaaattttttgcaggcgtaacgccattccagaccgtcaatatactgttccggggagatcatcatgcagggtgagacacgaaaaacggaaaaactgtttaaagaacctctttcaatacctcaatgcagcgggcgttctccgcaggagtgcctatgctgatgcgtatccattccggtaggccgtaaccgtcctgcgcgcggacgatgactcccctggtaagcatatcctggaacacctgcttgccccggcccactttcaccaggataaagttgccctggctgggaatccattccaggcccatttcccggaaagcctgctcataaaaacgcatgccttccttattattctccacagtgcggcgcacatgctcccggtcctccagggcggccagggcggcctcctgggccagaacatgcaggttgaacggagcacgcgccttgtgcagcatgctgcaaaccggttccggcgcaatgccgtagcccacgcgcagccccgccaggccgtaagccttggagaaggtgcgcagaacaaccacgttgcggccttcccgcacaaatttgagggtatccggaggattgtcggaaaactcccggtacgcctcgtcaaaaaccaccagcacatgttccgggaccttcgccatgaaatcgtctatttcctgctgtcccactacggtgcctacgggattggtgggattcgtaatgaacacgacgcgcgtattctccgtaatagcggccaggaagccgtccaggtcatgcgtccagtcctccttgttgggcacctccacgtacgcggcgccaaacagcttggacatgatagggtacatggaaaaggcgtgtttggcggccaccacctccgcacggggattcagcagggcatggcagatcagttcaatcacttcgctgctgcccgtgcccactaccgtctggccgaactccacgccgcagaactccgcaatagcggaacgcaggcggaaagccgctccgtccgggtaaatattcacgccggcagccgcacgggcaatcgcctccaccgccttcggggacggccccagaggattttcattagacgccagtttcacaatatcatggggattcaggcccagttcccgtgccgtctcctcaatcggcttgcccggctgataagccaccaactccagcacatgctgatttgcgaaactctcaatactcatagcggcggaatgttaccgccattccccgtttctggcaatacggatttccatccggccggcccctgggaagatgacagccgtttagagaatctgcgctgccggaaaagtggaaaccttttccggaatttttccattcttcctgcaatgcccttctaccggagaaaggcagccgtccactttctccggcagatttccgcctgctttttatgacggatcgcccaaatatgaaggagcacaaccccggaattcttcaatgccccataaggtcaaaaacatttcccttaaaaagcgggacggcattccgtgacggacggtaaaccggccccctgccctcctattttttacggctgcggcccctgcgcgggcggctgcgcagggcctggtacccggccacgacaaaggcgaacgtagtcaccgccagaaaggaacggaacagccaggccagaagttcccagtaaatctcctgagtcatgcggaaggttttttgccggaatcgggaacgttccccaaatcttcccggaggcgtttgacggcacaggcaatcagggtggctttatccagctggcagcgttccatgttcagcgcgtccgcttccgcatcccggaaaaaatggaccgataacggcattttccccttgatttgaatttttttctgactcttttttttattttccgtcttcataaaaatccttcttttggtgcaataacggccttaacagccctcttgtgcccccacaatgcacctgaaacggtatttcagtcaacaaaaatataccattaaaatgactttatgcaaaaaaggttgaaaaatagcaccattttcgttacaaagggtgcatgagtgagaatcaggacgaactcaaagtgcagatcaaggcctggctgaaacagcagaacatttcccgcaatgattttgcggcggaatgctacgtgtctcccaacacggtccgcaactggcttgccaaggtggccatccccaaagacaaggaagctctcatccggctcatgatggaaaaaacggaaagggagaaaaaactgaaggaggcggcaagagccaattggaagccctttgtcgtcatgctgagttccgaggattacaaactcatcgaagaagccgccagaagggacaacatgacggtggaggaatgggcggaagccaccctgatcaaggatgcccagaagaggatgaaaaattattacgacgacggcagccttccgggagatgtatccctggcggcggaagtaccggaggaatacggagcgcccagacgttccggcccttcatcatctccgccctcttctacccgccgcaagccgcggcaataaatcctggagggcatggcatcccgctgatgtccccccctgtctgccggttgctgcccggggggtatggaaaaggcgtgtgcttttatggaaacaaacccggcggacaggtggcggcggttgttttccagaggaacacgaaccccggttggaatccagccaaattctttcatttaccttcctgagccggaagaagagcaacggatgtaccgggagtcctttcacctggcaatccgctgctttctggaacccgtttgcccgtggttctttaaaagctctcccgtgttccgggcatggggttcccggcgtccctttctgatgattggctcatccctgaaaggcccctgattaaaggaatcgtttcgtcgcacgcgccatgctgcgcttgccgccggccggtatttttcacatgggccagatacggcagaaggaacggggcaaaacgtttcagggcaaaataaaacaggacgatggccgcaaacaccagcaacggcgtgaagaaggcgaacaggctggatttcatggcgggaggcaggaaaccgtaaatgggccagtgcagcatgaacgtcagaaagcaggcgggagccagcaaagctattttcgcagacaggccgggcaggtgcttttccatccagatgcctgcgtacatgatcatcatgacacccagaagcatgccaatggccgtctctttccacagggggatcactccggcggaatacagcgctatcagtacaacgggcataaaaatgcttacccagaaaaaaatgccgaattttttattcatcaacagatgaatgtcgtcaatccgccgggaactgagcgcaacgcccagcaggtaaaaagcacaggttccaatggaaatcgtctccgtgtggtccggggccgtgttgaagaaacagaaaaagaggagcaccgcaggaaacagcaggattttgacgcggaccagaagaggcgtcagcaacgtgaggatgataatgtccctcaggaaccaggaagggccgatggggggaacggcatgggaatcatccgcggagaaaaggttcatgcccggaagaaagacgtcccggataccaattaaattctcaaggcggaaggaagcgccgtcatgaggcaggacaaggaacacgtacagtacattccagaacatgaacggaataaacagccagaaagcccggttaaaagccttgttccaggtgatgttcctgcccaggaagtaccctgccagcaccaggaaaaacggaaccctccccaggtaaaagagatggaggctcaccgcctggagaaagggggaggacaggtggacgtacatgatcagaagggctgcaataacccttgatacgtcaatccataagacacgttttgatggggggggggggggggggggggtaagcgtgtcaagaatcggaggctggtttggggagttatacacttaagcggggaaaaagtaatgcaggcgggtgtcaaagtcaagtatccggaaccttttcgggcatgggctccgcatgggggcatccctgatttttttgctcgaaccggattcggagcttcgctatattggctcccgttatggcaacaccggattttcattatcaggatccttttcccatggaaaaggacgacacccaataccgtctcatcacgtcagactatgtgagcgtaggtgactttgaaggacatcccatgctgaaagtggaaccggaggggctgcgcctgctggctgcggaagccttccatgacgtggcctttttcctgcgccccgcccacctgaagcaggtggccgccattctggacgatccggaagccagcgacaatgataaaagcgtggccctgacgatgctccgcaacgcggaagtggcgtccgccggcatcctgcccttctgccaggacacgggcaccgccaccatcgtaggcaagaagggccagcaggtatggaccggctgtgacgactgcgaacagctttcccacggcgtttacgacgcctatacccagaacaacctgcgctattcccagacggtggcgctggatatgtacacggagaaaaacaccggcaccaaccttcccgcccaaattgacctggaagcggtggagggcatgaaatactccttcctgttcgtcgccaagggcggcggctccgccaacaaaacttacctttaccaggaaacgaaggccctgctcaacccggccacgctgaaaaagttcctggtggaaaagatgagtactctgggcacggcggcctgccctccctatcacatcgctttcgtcattggcggaacttctgcggaaaaatgcctgaagaccgtgaagatggcttccacgaagtactacgacaatctgccgactacggggaacgaacacggccgcgccttccgtgacctggaactggaaaaggaactgcatgaagaagcgtgcaaactgggcctgggtgcccagttcggcggcaagtggtacgctctggacgtgcgcgttatccggctgccccgccacggtgcctcctgcccggtgggcctgggagtctcctgctctgcggaccgcaacgcgaaagccaagatcacgccggagggcatctttattgaacagctggaaaccaaccccggccagtatattccggaagccctgcgcatgacctccagcgaagctgtctccattgacctgaaccgcccgatgaaggaagttctggaagaactgggcaagtaccccgtcaccacgcgcctgagcctgaacggcaccatcattgtggcgcgcgacatcgcccacgccaagctgaaggaacgcctggaaaagggcgaagggctgcctcagtatatgaaggatcaccccgtgtactacgccggcccggccaaaactcctgaaggctacccctccggttccttcggccccacgaccgcaggccgcatggattcctacgtagacctgttccaggaaaacggaggctccatgatcatgattgccaagggcaaccgcagccagcaggtaacggatgcctgccggaagcacggcggcttttacctgggctccatcggcggcccggccgccattctggccaagaacaacatcaaaaaagtggaactgctggaatacccggaactgggcatggaagccatctggaaaattgaagtggaagatttccccgccttcattctggtagatgacaagggcaacgatttcttcgcgaaaatccgcgaaggatgggcctgcgccggttgcgggcattaagcctgaaccgggaaaaagatgattcactgccggagtctttcggggctccggcttttttatgtcccgggttcagccctcccagtacagacggcacgaatatccgggaggaaacttccggaatgcctcatgctccccttcacgcaaacaggtaataaaccagcatcagcgccagattggcgccggcagccagcatcactccgcccggcttcaaatacggcgcctttccaagaaaggccgccagtaccgcaaagacggagtacagggatatccacatcagaaaaaatgctgtcaggttccgcccgttcccctgcccgtccaggggcatgttcccgccggggaaaaggaacggcaacgccggaaacacggcgtaaatgacatatacccagttcttcactatcatcctgaaagaaaccgtcagcggttccctgctaaacaggatattacgggagcaggcgttccgcgtcttttccttccgcagagcgcagggcaaatagaagggaagaagcatcagcgccaggacggggcctgcatataaaatagcggccattcccgctacgaaagcgaagaaagcgacaacaaggacaggcacgcctgccatgagcaggaaaagaaaggctgtcctgcgctccgccttctcccccattttcaggaaagaccatgaaagataagccatagggtaaaaatatggttttttaaagtttgccagaaacaggggccgtgcgcaagggaaagccgccaacggagcatccggagcagcgaagccccgtccctccgcacgcggcaggagaggaaccagacagactctgattgggattgccccgcacccgcgcccacgttatcctgtcttcatggtctaccgaatttgcaaatccatcgaactggaaagcgggcatctcctgtccaaacatcccggcaattgcaaattcccgcatggccatacgcgctccgtggaaatggtgttccgggcggaaacgctggatgccaatgacatggtgttggatttcaaggccgtcaagcaaatgatgggggatttcctccagcagtttgaccactccctgtgcgtgaatacggaggaccccaattacgccgccttcgtggccgcatacggggagcgcatcattccgttcgaccgggaagaccccaccagcgaggtgatggcacgcgtcattttcaatgctgcccggcacgcgctggaaaaagccagggagacccccggcgaatatcccgtgcgggcctgtgttgagctggaacgcgtgcgcgtgtgggaaaccagcagctcctgggcggaatatggggaataactgaaacagcgcgcttcccgccgggcggaacgctccgcaaagattcccggccccgcggaaggcacggccgcaatgcagccaccccggtgttcatcccttaaaagggattcaggcagatcatgcgcttctgcgtccagtgcccgtaggtggaagaatacacatccgtaatttcccgggcccattcgtcaatagtgcgctgatgatgggcgtattttttaaaatccttggtgtccacgcccagcagggagctgtggtcttcctcataatccgcaaattcggagacgatgcggccggactcatccctcaggcgtcccgccatggcaatgtgccctttcttgatgaaccgcttgaccagccctccccccttgatgccgctcagcgccgtgacaaagatgccggccctggcatttgtgggagtgatggaaatgatggcgagttccagcgtataagcccccctggttcccggaggcaccatttcaaaatgcggattttcggcaacctccttttccatgctggttgcaacgctcttctggaagtattccgccaggctgcgcagggcatcaaacccttccgcagtatccggcctcacatccatgtgcactgtatccaccggaacgacggccatcaggacttttttcccattcacgccgttcacccggtcattccagatttttttatcatcggcattccagtacgcgtcaaagggaatatgggaatccttattttttacctgatgagtgataaatcctgtttggggaacatgtttgaaattattggaacaagacactaccgccatgcagccaagcagcacgagggccatcagggaagccgggaataaaaaacggtgtttcttcatatcaagtaacaggcagaatcgtttttatcatggcccggcatcagctgtcaataaaacctgcgggtgaaaatcccgggctggggctctcctgccgggcagaaagagccaaggcgggaattcctagtcttcttcatccatggggcggtatttcacggccagcttttccaggattttcagggccctggaggcacggctgcggaaggatttgtagtcccgggggtcgcagtcgctccaggcgcgttcggacagggccagggcgcgcggccatgccatgtattccaccagacccatattgtacaggtattccgtccagatgttagcctggaggccgcgcaccctggcggcttcctccggggagagttccggcaattcatagccgtacacctgcttgagcggaataaggcccccgacggctttcggctccgtggatgcggcagactggtaatagtcaaaatagaagtgggaacacggcgccagaatgacgggatgccctttcctggctgccgctgcggcaaagccgttgccgcgccacgccataacgaggatgtgtttgtccgcctccagttccccggcttcatcccagacgatggcgtcatagccgtctttccgcacgtagtccgcaatctgctgcaggaaatcccggcccagggccttgaggtccttctccctcaggttctttaaacggttctggcaataccggcattttttccatgcctcggcagacacctcgtcatggcccaaatggatgggggagccgggcggaaaaacggccttgagttcatccaccacgtctttcacgaagcggagcgtttccgggcgccccatgcagacggcatcccgtccttttttcccctccacgggaaaatccacgccgtcgcaaatcaaatccccgtaggcatgcatggccgcataggaatggccgggaaggtctatttccggaacaacggtaacctggcggctgcgcgcataggcaataatctccttcatctgctcctgggtgtaaaaaccgccgtaggtagcttccgggtcatgctcctggatggcaagtttcacttccttccagttccattctccgtcagtgagcggaacgcgccaggcactcatggaggtaagcaatggatattttttaatttccaggcgccagccgggaccgtccgtcaggtgcaggtggaggcggttaagcttgaacagggacatggtgtcaaccatgcgcttgacttccgccatggtaaagaagtggcgggaaacatccagcatcaggccccgccattcaaagcggggatcatcccggagggaaaaaacgggtacggaaaacccctccccggtccggttggcgcttaaaatctggaccatgctctgccacgcgtagaaaaggccctggggcgccgccgctttcagatgcaggatgcccctcccttccccgccacgctccaggcgggcctcatatccttctcctgtccccgagggggttccctcaaccgaacagacggcatccgcagaggctttgtcacgggttatggagaggccggacaaaacgccctgggcattgagcacattcaggagggcttccactacaggaacatccttttccggcgcatagaccgccagccgcagcgggagatgcgccacggcggcccggtcagacctgcatgcggaaggcgcggggagcagcacctcctcggccggcagcatttccgccatgccggcgcccggtaatccggacagggccagccatgctgccagacggaaacaacaccccttattcatcatcccggaagtacggcccaccctggtctcttctttcaatggaaggagctttccctcagacccctgtgtcccggaaggcaaaggcgcggccatattcagccgcgcctgccggattccgtccttttttacattcacctgcgtccgccaaaaaggccgccaaggccgccccccaatccacccaggcccttcaggccgcccaaacctccgcccatgccgggaaggcctggaatcttgccccccttccctttcatggaagccatctgcttcatcatggcgcccattttgcccttgccggacatcatcttgcgcatttcggaaaaattcttgatcagcttgttcacctccatcagaggacggccgcagcccgcggcaatacggcggcggcgggacggattcaacaggttgggattgctcctttcctttgccgtcatggagagcacaatggcttccatgtgcttcatccgcttggggtccagggcgccttccggaagctgtttcttgattttgccgaagccggggagcaggcccagcagtccttccagcggtcccaggttctgcatcatcttcatctggtccagaaagtcgttgaaatcaaattggccggacatcatgcggtccatggatttggcagcctgctcttcgtcaatgcgggcggcggcatgctccaccagcccgacaatgtcgcccatgcccagaatgcgatccgccatgcggccggggacgaaggggccgaactgatccagcttttccccctcaccggaaaatttgatgggcttgcccgttacggaacgcatggaaagagccgcgcccccgcgggcatcgccgtccagcttggtcaggacgatgcccgtcacgttcacggcacggtcaaaggtctgggccacattcacggcctgctgtcccgtggcggcatccgccaccaggagcgtttccctcggcgaaaggaaggcgtgcagctggcgcagctcgtctatcagggcttcatccacctcctgacgtcccgccgtgtcaaaaatcatgacggttccgttctgggtccgggcccattccagagcctcgcgcgccacggccaccacgtccctgctgcctggtgcgggcttataaacgggcactcctatttgttccgccagcgtcgccagctggtgcacggcggcggggcgcaccaggtcgcaggccaccagcagggggcggcgcccctcgttcttcaggcggagggccagcttcgcgctggtcgtggtcttgccggcgccgttcagccccaccaccatgattctggcagggtccgtcagatccagccccacggcgtccccgcccagcagggcggcgatttcatcacggaaaattttgacgatttgctctccgggcttgatggatttgagcacttcctgccccatcgcccgttccttcacgcggccgatgaattcccgggccacgccaaactccacgtccgcctccagcaaagccagccggatatcgcgcagggcgtctgcaatatttttctcggaaattttgcccaggccgcgcagcctccggaacgtgttatccagtttatctgctaaaagtgaaaacataatcgtatgatgcgccagactgtgccacatttcccccttcccgtcaacaagcgcgccctgcatgggacatgatgcttgacttgccgggggcttcgccccatcttttcccgcatggcaccctttgacctgaaagaggaaatcttacgcctgaaagaagaacgcaacgccatcatcctggcgcacagctaccagaccggggatatccaggacatggccgactacgtgggcgattccctggggctggcctacaaggcgcagaatacggattgcgacgtgatcgccttctgcggcgtccatttcatggcggaaaccgccaaaattcttaatccggacaaaaccgtcatccttccggatgctgatgccggctgttccctggaagcctcctgcgatgccggggaactggaagccttcttaaaggaaaacgcccataagaattactatgtagtggcgtatgtgaactgctccatcggcgtcaaggctctggcggacgtaatcgtcacctccgggaatgccgtaaaaatcgtctcccaggctccggaggaccgccccatcctgttcgtcccggaccagaatctgggtgcatgggtaagccgccagcttggccgccccctggaactgtggaacggggcctgccacgtgcacatggaattcacgcgggaccagattcttgccctgaaggaaaaacaccccggtgtgccggtagtggcccatccggaatgcacggaagccgtgcgcctgctggcggaccatatctgctccacggaaaaaatgatcccctattgcacggaaaaccccgccaaatctttcatcattgtgacggaatccggcattctgcaccgtctccgcaagctggtgccgggaaaagaattcattcccgcgcccacggagcaatgctcctgcagcacctgcccgtacatgaaaatgaacacgctggaaaaactgtacctggcccttcgggacctttctcccgccgtggaactgccggaagacctgcgcagaagggcggaagccccgctgctgcgcatgctggagcaatcccaatcctaacctctgccttccccgcatgatacgcctttcagaccacatcgcggccgctggcggctggctctccctggaagctttcatgcagctggccctgcaccacccgcaggaagggtactactcctcttccattgaaaacatcggtcaacgcggggatttttccaccacccccacgctttcccccatcctcgcaaaagccattgtcgcgcactggaaagaagcctgctcccgctgcggcagacggctgcctctgctggaaataggcgccggctccggtgccctggccgttaaaatcctggagcagctgggattctggaaccgcctgaatacggattacgtgattgtggaatcttccccacgtctgcgcgaattccagcaccttctgctgggaggccgcgccaaaatttactccaccatggaaaaagcgctgaaacactgcggaggcaaggcctttattttctccaacgagctggtggatgccttcccggcgcgcgtatttgaatacacggaacaggactggaaagaagtggggcttgtcgtgaaaaacggagccgtccgggaagaactgcgccccgtccggcagcagccgcttttctcccatatgctggaatacggctcccagccggggcagcgggtggaaattcacgactcctacgcgcgctggtttacgagctggcttcccctctgggacatgggcgtcatgacggtcatcgactacggggatgaaatggagcggctgtactatcgccgcccccggggttccctgcgcgggtacaaaagccaccaggtgctgacgggggaggaactgtaccgtaaccccggcctcacggatttgacctgtgacgtcaattttacggacctgctggaactatcccgcaactgtctgggggactgggtcactttcatgacccagcgggactacctgctcccccatgcggaaaacacgccgcaggatgcctttctgacggatgaatacggtgccggaggacacttccacgtactcattcaggaacgccagcggctgcaaccggaagggttccagtaatccaggagaccgtacttggaaatgccggacgaaacctaagcaagcccccgtccgacagcgacggcccccatctttcttcgagagaaagaaaaatgttgattacaggaattagactgatgcccggaagggatggcactctatcaggaattttttctaacaaacagacaacattgatgtccataacagggaggtgttgagcgtaagaattataatattatcttttcgtgtaaaataatgaccatcttttataaaaaatcaaaaacatacaaataaaattctatcgacaccgacttcggatcatactattgataaaacgatcaggaaagggcggcccccctcgcttccttcattacccccgactcttgaatacctgatgaatccgcctcatcgttctgccgttcccggctacgggaaatggtactttggagccggcggcagcctcggcaggcggggcatggaggccgctccggagcccgatccgctgccgtttgaagcgatccggatccatgaggaaaggaacgtggggccgccgagcacgtcggcggacgggtacagcgcgcacgggacattcaccatcccggaaggagcggagggcaaaaaactctacggcacctgctcgctcttccttggggtggacgactggggaatcctggaagtaaaggactccggcggcaacgtggtggcgcaggtggatctgaaggaaaacccgcagacggcgggcgagcagggcgggcacaaataccacacggggatcggcggggcgcagctcccctccggcacctacagctgggaagtcagccagaccaacatcgactacaatccggcaagcggcaacacctccatctgcaactacagcatcgacgtggtgccgacggaaccggggggcaggaaagaacccgaaccgtgtccctgcgagggagacacgtgcgacaacagcggcggaacgccgccttccccgtcgctggcccggtcgggccctgaggcgggcatggaaagcggcgccctgggaaactacagctcggcggggtgcagcgtgacggcggaaagcacggccacgctgatgtactggtcctgcaacttcggagcgttccgtggacttgggggccttccggccggaagggtggaactgagggctgaggaaagaacctccggtctggaaagcccctcctcgctggcctacaaccatcccctgaacagccgtctggacgtgccggaagggggcattgcgccgggagtgcggttcaacctggtgcagggagaccgggtaattgccatgcgctgctacacggacgggtccgtgctgcccatcggggtggacacgtcgggcggagggcgtgcggcgctggccacggcggaaggacaatcctgcctgcgctgggtggtggaagacggcagccaatacctcttctcggcggaaacgggaacgctcctctcctacaccaccacggacaggcaggtcatctccaacgcgtcatcctatctggacgtcaggcatgccggagacggctcgctgaggcaaatctggaacctgtgggacggcctgctcaacgtggaaaacgtcacctccacgggttacgtcatcgcgctctacacgcctggacaaatcaccggaacggacggacagggattttataccgttacgggcgctcccttgaaaacatttattctttccctggatgctgaggaaaagttcaccatcacggaacaggcgcctgccaggcagccctacgccgtcacctggtggaacgacggcctggcgtggaacatgcggcagggcacgggggaagacgccctcacgaccctccgcacgcgcacggagctggaaccggaaaactcggtctggcagctggtcacggaaatctccaaaaacggaatcgtggcggcgcgcacctgcgccatctaccagaccacggacgtgggcgacctgctgctcacgctggcggaaggctacggaagcccggaggagcaaaccacgcaatacgcctacgaccagtgcgggcggctcaggacggaaacggccccggacggcagccagactcattacgcctatgacctctacggccgcccgcttagccgggacgaaccgtgggcggaaaacggcaggcgcatcacgcgctacacctatgcctgttcgggagaagccgacttcagcaacgaacccgccacggaaacggcagacctgcttccgctggaagggcacgtcaaaacgctgacatccaccacctggaaatacacgacggccaaccacatcaaaagaacggaacggcgggccacgggcctgggtgtggcgggcacgcgcctgacggcggaggaacaatggctggccggagccgccaacatccatgcccgcggacgcacgcggttcagccgggacctcgacggcgtgcaaacgtggcacgactacgcggccacgacggagcacggcgccctctacacggaaacggtggaaacgcgcatcaacggagaagccgttccgggacaaagcacgcgcgccgtcacctggatcacggcggaagggcagcgcgtcagggaagaaaactacctcctgctttccaccgggcaatgggcgctcacgggcagcgccgtctacgaatttgacacgcagaaccggtgggtgaagcggacggcgggcaacggccggctcacggagcgcgaactgatgtgcgacggaggcctgctgtgggaaatcgatgaaaacggcatcaggacggactacgcctacgacacggcgcgccaactggtggaagtcacgcgttccgccgtgatggacggggaaaccgtcatcacgccggaaaccatcaccacctacacccgggatgcggcagggcgcgtgctctccacgcgtcaagacacgggggcgatgacgacccaagaaagcacggagtacgacttgctggggaggatgacttcctctacggacgtcctgggccgggtcactacctacgcctacagccaggacggcttgacggtcacgcaaaccgtcccttccggggctacattcatcacgcgcagcgcgccggacggaacggtgatggaagaatccggcacggggcagcggcacgtcatctacgccatcgacctggtcagcgacggtgtgcggaccttcacgaaagccgtctccggggaaacgcaaaccgagctgcagcgcagtattgtcaacggagccggggaaaccctgcgcacgggcgtccccaacaccgtcggcggagtcatttacacgaggaacacctacaacgccagggggcagctcaccaaaacgcagacggacgcgggcaatgcggccacgacgatggccccgaccctgtgggaatacgacgactttggcaacaaaacgaaagaaacctggaaactcgccgatccggctacggtgtccaactcgcgcatcaccacgtggagctacggcgtggaacaggcccaggatgaggtataccgcgttgttacggcgaccaggaacaacggccagggaacgacctataacgaaacgcaaaaaacgctgtcttcctccctctcatctatattggaaagcaaagtcatttccatcgaccccagaggaaacgcttccgaacaatggagcgaatacggcccgggcgccgtccggacgcagaaaagcagcattcccacttccaatgtcatagcaacggccacggtcattgacgggttcaccaccacgcagacggaccatgcgggcgtcacggccacgcatacccgcgcctacacggaaaccggcgtcatctactccagcacggacggccggggcaacacggtcacgacgaaaaccgatatcgccgggcgcaccgtttcggtgacggacgcggcgggcaacacgacttctaccgcctacggcccctggtttgaccagcctgccgtcgtcaccaacgccctgggcaacacgacctgctacggctacgacctccggggccgcaacacggcgcaatggggaacggggacccagcccctgctcttcggctacgacgaggcggacaggatgataagcctcaccacgttccgggaggacgcgggcgacatcaccgccgaccccacgggacgcacggacggagacaccaccacctggagctacgacgaagccacggggctactggtccaaaaaacctacgcggacggaacgcatgaagacaccacctacaatgccctgaacctgaaatccaccctgaccgatgcccgcggcatcgtcaccacctggggctacaacctgaaaaagggggtcaacaactccgtctcctacagcgactccacgcccggcatccagtacgcctacaactacctcaaccagctgacccgggtcacggacgcctccggctcgcgttcccttgcctatacccaatacaacgaacaggacaccgataccatcaccatcggagggagctcttaccagctccaggaacactacgacacttacggacgctcctccggctataccctgaaacagggaaccgacgtcctccaggaagccagccagggctatgaagccaacgggcggcttgccagtgccggaatcatgcacgagggaacggagcaaagcttcgcctacggctatctggcgggaagcagcctgctctccagccttgcgatgcccaatagcatcgttagggaacttgcttacgaacagcggcgtgatttgatcaccggaatgaactatcatttgggagaaactgtgctagtctcccgcacccagagctacgatgcattgggacgcccggccacgcgcacgcagcaacggggaatggaagcagcccgcagcgacagcttcagctacaacggcagaaacgaactcaccgccgccaccctgggcgccgccccctacggctacagctacgacaacatcggcaaccgcaagacggcacgggaaccggccgaggaactcgcctacgcggccaacgggctcaaccagtacaccggcattgaagaaagcggggaagcgccttttgtgccgacgtacgacgcctcgggcaaccagaccttgatcaagacgtcaacgggcgtgtggaccgtggtctacaacgcggccaaccgcgcggtgagcttcaccagccggaatggaaacacgattattgagtgcggctacgactacctgggacgccgctacatgaagaaagtgacccaaaacggcacggccgccagccacgaacggtacctgtaccgaggctatttacaaatagcggcattggatatgctggacaaccgtaacgtgctccggacactgctgtgggaccctctggaaccgatggccacccgccccctggccctcgtgcaaggcgcttccctgtactgctatggaacggacttcaacaagaatgtgtcggaggtcttcgacgcacagggaacgatcgcggcggcttacgattactccccctatggaacagccacccgcaccggaagactcgtccagcccgtccagtggtccggcgaaatgcacgacgaagaactcgccctggtctattacaactaccgctattacaaccccaaagacggcaggtggatcaaccgcgatccaatcgctgaacagggaggatggaatctttatgcgttcgtagggaatagcactatatggcataacgactatcgtgggatttctaatgctaaagaacaatgttgttgtggaaagaaaagattacctaataaatcttgttgcgaaaatggtgaaattgtgaattctaaatcttgcaaaataagaattctcatgggacattataataaggaaaatttagaaaaaaagattaatcaattttgtaaagctgataggcttgggatcgtaagttgttattctacagaaacaaatacatggattcctactactcaatcttatcctatgatggtagaaatcctgatataattaacagaggaggagaagctgcacggtatttgcgggcagagttggaggcagctaaacaggaagccaaaaatatgtgtagcaaagaaaataaaagatgttgctctaaggttatcattatcgtttcggattcaggagataagaatggtaaaggagcttggcaagtaaaatttacttttggaataaatccctatacagttataatagactgcgataagcccaaacccagaaattgcaaaaccagaggaggaatggtttcctctaaataagtcgagatgttttaagtttattctactatgaaattaacatgtattatatttttattttttattttttgtgttatcgcaattggtgaaatggaagataaggaatataaagactttgacctatatacagaattatcatttttaaaaaatgggaagaaatttcgagccacgaagttatctttaaatcaaaggaaggaattgagagatattttaagtaaatatgatttattcttggaaggaagaacagaaaacaccttcccttttataggaactttggctatatttcgtgttgctatagataaaaagccgtatttattatgcatgataaataatacaaaccatattttcgcaaaaaaaaagattgggcgagaggaatatcaaaaaaaattattttggatacaggaaatagatggaaataataatccggaaaaaccggaaattaggatatttgaatccgccgccctctatttagagttggagaaatttttggaaagaattgcatctcctgtcttgaaaaaagagtaataattgttataacattgttccctgcctccccctctgaatatagatttaaagttacgcgacgtttggggcgttgttaccacaactgtcctcagtaacggggaacagaacctacatgccgtgcgtcctacgactgcacctacacggcaacatcaacaaccgcaagaggacgcaggaaataatcgaagagctcacctacgcgactaacagcttgaaccagtcaccagcattatcaattcaactctcaattttccactcctccacaaccttttattcccgcttatgacgccttgggcaaccaggccttgatcaaaaaacttcaacggacatttggaacgctgttgtacactgcggccaaccgtgcggtgagtttcaccagccgggacggcgcgacagtcgtggaatgcggctacgactaccagggacggtgctacgtgaagaaagtcacccaaaacggcacggtcgccagccacgaacggtacctgtaccgaggctatttgcagatagccgccctggatatgctggacaaccggaacgtgctccggacactgctgtggaaccctctggaaccggtggccacccgccccctggccctcgtgcagggcgcttccctgtactgctacggcgtggacttcaacaagaatgtcacagaggtcttcgacgcacagggaacgatcgcggcggcttatgattactccccctatggggccgtgaccgatacgggcagcctcgtccagcccgtccagtggtccggcgagatgcacgatggggaattggaactggactattataattaccgctattataatcctgcagacggcaggtggatcaaccgcgatcctatcgctgaacagggcgggtggaatctttatgtgttcctcggtagcagccctaaagataagtttgatactttggggttgataggaatatttggattattaggaggagctttaatagattatgggtttcaagttactgcaaactatattcaagacaaagaagatccttggacagatatagattggggttcggttaaaacttctacagctttaggggctgcaggaatacctggaaatgtaaaaataggaaaaaatatatataaaaatattaaggaggctgttaagatgcgcaaacgtattaaaaatacgtcagaaaattcacatatataaagaaaaattaccaacagctcatcaaaaaaaacttttgaaaagaaaacagaaaagagaaaatatttattctgaatataaaaatgaaataaagaataattttttaattggaattattcgaggattagctaaaaatataggttctgaggtttatgaaaattacaaaaatacgttaggaaacaagtacgaaaaatgctgtcaagacatcatcataataattatagtagaaatagaagtagaaataaaaatagattcttttcaacaatatgagaacaataacattcttgaggaaaatccaaattatataccacctacaagaccattttatcctttaagataaatataaaataatgaattacttatatatattttcttttgtattagctattggcttatctttttatgtgtatggattaaaaaaaggagcatggtatttttttataacattttttattatcttattagggatcatagctgacgatttattattcccttatacaactataattgcaatattaatattatcaatttcattctatttttatagaaaattctttcatttaagaaaagaaataaaaaataataaaatcaataaaaaaatattaatcctaaaaaagtgaaaagaaaaaaacggtttcgaaataaacaaaaaaactactaaacataaataacgacaatagaatttcgtatatttaatatatcggactgtattccgaatattgttgtaggatcttctggaaccgatggctacccgcctcctggccctcgtgcaggacgcttccctgtactgcttacggcgtggacttcaacaagaatgtcacataggtcttcgacgcacagggaacgatcgcggcggcttacgattactccccctatggggccgtgaccggtacgggcagcctcgtccagcccgtccacctgtgggatctcaaaagcagcaatgtcgcagaactcatgcacacaacggctggaatcctcattatcatattttacagttaatcagtctcctatagtagctggttgccggtgtttcgataagcggactacaattccgaacaatcccaattatcctgaatatacaggtcagcctaccggaggaggaattgaagtcatcaaataacaaaaattatggcaaattatttttcaggagaagaaatcaaagttggagatttcattacaacagataacggatatgataaaaataaagtaatgaaattaatagataacacatatttaatgaaatcttatggtttagattattttggcgcattattatctagcagcagcgctaaaggaatgatctttgtatcgtttaaagaactttcatctcaagatacaaaatttataagaaggaaaacaatttaaataaaattatgaaaacatgaataatcattttaacaggtctttcttttctatcaggaagcaatttgtcatttgcagaaaaggagcaaaagaatacacggcaagaattttcttttggagatgatcattgtgtgactagatttaatttttttgcaaactattcaactgattaatacagaaaaaaatatacacattcagtattcaacttctcaatactggatatggttaaatggaatatttgatagcagaaagtataataaccgaaaatataaattctccttctttcccgcatgagtatgaactcatcataaataattgggaaaatgtaaaaaacagtgtgaggaaataaaaaataatgattattataaatattctgcttttaaaaattgtcatgaatgacacgattgcaatatgaatggattttttaagatatgggaaaaatagttttagtcaaaaaatataatatattctacggatttttattttctaattgatgcaatagcaagtctttcttattctgtattaagagctatgatgccctgggacacgcaaccatacgcacgcagtggcggggaacggaatccgtccacagcgacagtttcagttacaaggcagaaacaaactcaccggagttaccctgaacaccacccctacagtacagctacgataacatcggcaaccgcaagacaaacgcaggagacagagaaaaaatttataaatgcctattcaattttatacatcttcacgaaattgttatgaattaagatttattgcaacaatatatcgccatccggtatacgacgaaactttcgaaatctaaaaaatcatattatgtcaaaatatataataattcctattattttcacatcaacaatagtttatggagataatcaaaaatttaatgaatatgcaattttttgcgaaaaaatgattgtcacattgcagagctgcacggatgaaaaatccactttttcacactcttccgaatttcctattattttatatactgttttaaatgaaaatcctttgaaagatttttttaaatctcaaaagggagctttatatcatattatgctattggcggagatagaaagattgaaccatcacaaatggttcaatctttcctctatgaaaaatcatgttaatcaaataaaatcaaaaaataccttatgcaacggcatagaggatccaagttctgctgtttccgccaaggaaaaaattattaattacgtaaataatttaaatgataataaatcagatgtactctatttaatttcatatttattggatatatacaaaattaatgatttggaattgtttatgaaaatcatgtcgatatcagattgcgaattgctcaaaaaaatagatataataaaaaaaaagattggttctttacaaattgatcatctggaacggacaacaatcaaacatttgataaaagaaattcaaaacaaatataaaatacatgaaaatatttataatgaattaagaaaaaaattaaacagtaacatagattgattcgtatcaagaagaatttgtatatgataaaattgcttctccgagagaaatcatgcttgtctccagcagcctgatctatgatggcctggatgccgtcccctcctacggttacagctgcgacaacatcggtaaccgcaagacggcacaggaattggcctaagaactctcctatgcagccaaccgcgcggcgagcttcaccagccgggacggagcgaccatcttggaatgcggctacgaccgccagggacgaaggtacatgaagaaaatcaccgtcaacgggacagtcgccagccatggacgaacctgtaccaggactatttacagatagccgcctcttgactgccggatgccgaacaaataaaatgaataaagagaaccctatatttgttttcccggtttatcataacaaataccatgcttgattttctcgttttcctgctggatatcccgtcccttcttgctgatttttctccccgcgccaagcataagggagaatcaccgtactggcgtttcatggggctttttttactgactgcagaactggttattctatttttatgggatattacggaaagcccgccagctcttgtagcctgtattactttgggcctctggctgatcgcgcacctctccatccgcgccttcaggaacgggaaaaacgtaaacggcctctccgtccgttccgctccgccattttcctcacaggcgccacaaagaaatgaagcccctaccccgtatctccctgaaagggaatagctatataatttatttattatcaatcattttaaaatatatacccggatttttgtcatacaaatttcttctttttgaacggatgctcctgtccgggactctaacctgcatcagcaacaaaccgggcggcgggaggtagagagaccgccgcccattatggggagttctgagtttcataggtaatatagttggataaaaaacccgcacgggggaaaccctgtgcgggtttattcatcccccctcccggaatgccggaaaacagggccggaacaggccgcagaaaatcatggctgaaccaaattaaggcttgagagttgaaggcatctcgctaatctggcttcagcaagaatcatctgttatcatggtcaccaagaacgaaccgaatatttacgaaacgggagtactggactccaatgcggaaggcaattttgtctataccaccctggacgccgccatcaactggattcgtaaaaattccctctggcccatgccgatgggtctttcctgctgcgccattgagttcatggccgtggcctgttcccggtatgacctttcccgcttcggctcggaagtgacacgtttttccccccgccaggcggacgtgatgattgtagccggcaccgtcacttataaaatggccctggccgtccgccgtatctgggaccagatgccggaacccaagtggtgcatcgccatgggcgcgtgcgcttccaccggcggcatgttccgctcctattccgtactccaaggcgtggacaagattcttcccgtggacgtttacatttccggttgcccgccccgtccggaggctattctggaagccctgctcaccctgcgcaagaagctggatacccagcagcccgcacgcactttcttcaagaaggaagaacctcgcgaagccaacgctcccgtcccggtcaacacggaaatgccccttgaataagttttttcaaacgtttcttccgttcacttttaccattttttctccatgctttctctagaatcacagattaaaaccgccgcagacaacgcccaaaaccgctttgggaaagacatcatcacggaatgctacgaattccgcggagatattacgctgaccgtcgcgcgccaagccgtggcggatgttgtccgctggctacgggattccgccgggtttgatatgctggttaacctttcttccgtggacaatatgggggaaagcccccgctttgaagtcaactacacgctgacacagtcggaaacgggagcgaacctgagcctcaagacgaaggtggacgatggcgaagaagtgcccagcgtcacggaaattttccagtccgccaactggcacgaacgtgaagcatgggacctgatgggcatcaagttctcaggccatcctgatttgcgccgcattttgatgtgggaaggttatccttatttccctctgcgaaaggatttccctgttcaaggcgtacctactgaactgccgggcgtcgcctttacggaggcggctcccacccagggagcgccgttcgctacggaacaaggccgctgccccagtgcctgccgcgaaccccgatcccataaattctagcccattttccagccccgcaaggcggggccccacccatgacccgactcatcctgcccatatgcatcatcagcctgctcagcggctgccaggacgccaacccggcagagcgggaatggaaggagcagttatataaaaacctggcaatcgtgggggccaggaactggattgtcatcgcggaatcctcctttcccgcctacacgggaaccggcatcagaaccatggtttccgacaagacgtcggacgaagtactcctggatgtgctgaatatgctggaagaggaagcccacgtggtaccccgcatcatgatcagctcggagctgcgcagcattacggaggactatgctcccggcattaagcgctaccgcaacaatatcaataaaatgcttcctgggcgccagcattttgaactgatgagccgtacgatcaattccctgatcgaagacgcggccaggcaattcaacgtgctggtcattaaaaccaagacatccctgccttactccaatatttatattgaactggattccgggtactgggattcggaatcggaaacggtactccgcaagtctctggaagccaaggacgccgccaaccgccgcgcggcccaggacagagtgctggacgtgcccctggttccgggagccacgcctgcgccacagggcaacaaggaaaatccgccaatgccgggagctcccgcctcccccgcggacaacctgccggagctcccgcgggaaaaccgccaaccggcttccccctccggagacaaggcccccggcgtgcctccgcctcccatcagggatcctctgggaaggaaaaccgccattgccagattttcatgaaccatcatatggacaaggctacagaagaacgcctccgcgcagaggcatgggtaggggacgccattttggcgttgtacgtcagggaatggattctggcggaggaaggagcgatcaacggcaagcttttcgtagaattcaccagcaatgattttctgcgccgcaccggcaacgccacaggcgtggaagcggagataggccgcactttcaaagcgggcggcctggaagcagcctatgcatggattgagcatcatttgaagccccgcatggaggaacgctggcacaccctgcgcagaaaagccctccggtaaactgccgccgccatgcccgccaccggaacacccctgccttgggaccgcggcaacggcccctgcgtgatggccccgccccatttgaggggctgggcggaagaggccgccgcctttctttccctccggggcatggacggaatcacagccttcgccacctccggctcttccggttctccgcccaaagccattttgtttacccgccgcgccctggacatatgcgcgcgcggggcattggaacatttacatgcggaaagcggggactggtgctgcccgctgcctgtatggcatgtggggggcgccatgatttacctgcgcgcggccctggccggaaccgccgtccatacgctccgcggaaagtggtgcccgcaggcttatgccgacctgatgaaaagttccggagccagatggtcctccctggtccccacgcaggtagtggatctggtcagcctcggcctccgcgcgccttccaccgccgggtgcattatcgtaggcggcggcgcgctggacacggagacgggacggaaagcacgcacccttggctggcccgtagtgcagagctacggcatgacggaagccggctcccaattagccacggcccttcccggagattccttccatacggaccgcctttcccttctgccccattgggaagctcagacggacaaaggcggcctcctgcgcttccaggggaaaggcaaattgttcggccgcctgctgacgcagtctcatggagggttccttctggaaagagtcgctccgcaggagtggtggagcacccgcgacctggtgcgcctggaagggcgtttgctgacctttctgcgccgggcggacagacttgtcaaagtcctgggggaactggtggatccggatgccgttcaggacgttttgcgccgcagcgtcccggaggctgtcgtggaggcagttccacatccgcgcgccggaatggaactggtcgcctgcggcccttccgccgcccccctgaagcaggcctgccgcgagtggaatgcgtcggccccaggcccccagcgcatccgcgccgtcatggaaacgcccatccccctcacggtcatgggaaagctggacagaaaccggctgcgctcccagttgagcgatcatccggaaaagttgaagggaatttactaaaaggtaatcttccggggatattcatcaaaagaatccggacctgatggaatgaagaaatacggcggggttggaatccccaatcccttgcccacttcattcatcccgtctcccaggaagccattttcctccgccttgcgggcttccgcacacgtcttcggaaccacccggtcccactccatttttttctttaaaaaaagaacgtgacatgaccaataattaaacattcagacacgtgaaaaacgcttgtagggcagaggtttttcctgctagaaaagagttgacccatgcgagcccgtcttttgcttattccctttattttttccgttccggcttatggccaggacattccgtccgccgcagcggcaaatccccccgggcaggtgaaatacgctccggtccggaacctctcccaactgcctatggacggcggctggacgtatggggaagtgctggacaaagccgcggctggagacttccgggccaatatgctggccggggaatactggatggggctttattacctgaaccgtggagacctgccgctggcctgcctggaacatatgcagcattttttccgtgatgcggccacggcatccggccatccggcacccaagctcatgatgacggatccttacgggattttcgggattttcaaggcgcaacccatgcaaccggaacatgcggaatggctggctgcctgccgcaagcttgcggaaaagggagacatggatgccgttacggccctgtacaccgtcacggatcttccggaagccgagttgagacgctacctggcccccctggaaaagaaggccgcttccggcgaccaggatgcgctggcccagctcgctttcatcaaagtggattggctgaaggaaaatcccgccaacgttatcgagaccctgaagcaatactggaaaaacgccaaaccggttcttctggcgcggataggggaactggcccttgccctggacggcaaggacggcaggggatggagggatacggccattcaatccctttcccgggctgcggaaaaggggcacgcgggggccatgcggcttctggcggaattgacgaagggggccgcaccggcacaggccggaaagcttttggcggaactgcgctccagaggggatctggaaactctgctggcggacctctccgccggcatgaaggaaaaaacagggggagggaaaagctccctcctccagcctttgttcgagcaggccaggaaactgggcagcaataacgcctgtgcctggtacgcccagttaatttccgaagcgcagcccccgcaggaacaggagctgcgcaaggcggcccttgatctgctgtcccttcatgacgaacggggcatgccatacctgaaggaacctctttccttcccccagaaaaaactcaaccagcttcccccctacgccaagacgcataaagagcttgagctggcctctcagcttggggacgcagattccagcgtacagttgggcgagctgtggaaggaggaactggccaatacactggattccgtagggaaggcccatgaagcgcgggaaaatatgcgcgtatggtacaggcaggcagcggaggaaggccaccccctggccaggctgcgcctggcccaaatggaaaacccggacttaatggacaaaccgtccgcagaacctgccagaacgctgctgaacgattgcctggcaaaagccgccacaggagatttcatcacgctgaaaggaatttccgaatacgtcacgccggaacaatgggaacagctgaccgccaccctccgtaaaaaagctcagggggggaacgcccgcagccaggcggatctggcatacctgatgttattcagttacaggagcgaagaaaccggctacccggaagccctggcctgggcccggctttccgccggacagggagatccctgcggcatgtacgtgctcggccgcgccctcatttatgaattcggcctggaaaaacgcatggccgagggggattcctggatgttccggggagccttgaaaggccatgtggatgcggcggacatgtggagttccaacaatgagaacctgcagccttacagcgccatgatgcacggtctggcggcacggggacatatcccctccctgcttttcctggccaaccaggcggcctatccccagaatacgggggaaacagcggccctggacaacggatccacttccgcctgccagcaggtcaagctgaccctgaacggagaggacgccaacactccgccgtggctccggaaaccggaacagaagggtaagggggaagatattccggcggatgccggaaccgttcctccctggatgaccccgtccggcagggaacgccaggccccggccccgaaaaccatcaatccggaagccgtgaagttctgggaacaggctgtggaactcggcagcctgacggcactggacgagctggctaattattatgaaaccgtggcaggaaatgtgcaggagcctgcggaacggcagcagcttctggcctctgccatgacggcagccaccgccctggtgaaaaaggaggacgtacgcggtttcaagaggctggcccgctattacgagcagggcatcggcgtgcagccgaacagggaactgtacaaggattatgtactgaaagctgcggaaaccagggatccggaagctctggtggagaaggcgcgcctgctcatcaagggggaggatctggagccggacccgaaaatggcgctgaatattctgaccgatctggaagagaaccagacgcatgcggtgcccggcatgcatttcctgctcggctacttgcatgaagaaggcctcggcactccgcaggatatggccctggcctatcagttttacatcaagggggcggaacaggacgacgccaagtgcatgaacaacctgggttccatgtatgaacgcggaactggcgtagccaagaacctggccgaagcccaaaagtggtatgaacgggcggcggagctggggaatgaagacgctcttgccaatgtggaacgggtaagggaaaaactcaacacgaagaagaaataggcgcctttcccgttccggaaatgccacggaatggcggtggaacacaaattttagcgcaggtttctgcagacggcagaaaataatgcgtgcgaagcggacgcgattttttaaagcgcccctgcctgtttcaagggaagccatgcttttgtaattcgagcatcttttacaaacagccgcccgtccggttgcggcacggatacgcggcgctccccagccgggcatgcctcgccggaccgtatagatttctcaaaaaacggaagcaggaacggaatttttttcagaaaggacgtacctaagttattcccgagtcactttcaaccgcaaaaaccggcgttccatcccgctttcccgtacgggttccgcatcccaaaattcggcagccgtctttccggcggtttccacttctcccagggaaatccagtcgaccaggtccgtggaggcttccacttcatgcttcacatccgttgcctgcggatttacaggccagcgcagcaccagatgcaagcatccgtcctccccctcttccagcgttactttcataacgctcccgcagggtttcaacggatcctgtcctgtggcgtatttcatcaggttggggataccgtccccggcaggaacggcatccgcagccgtccgatccgcggcagcatccggagggaaggagtcctgcacccacttgtcgtagcccgtcaattcggcgccatcctgcgttatgatgacagagcattcctgtttgtcggaagaacggaagcttaccgtcccggaccgtccgtcagcggatttgttttccgccgccgtcaaaatgactgtagtccggccgattcccgaaacggcggaggcggaaatccagtccggacaatctgcgaccacccagcccagagccttctcttccgactgcacttccaccgccacagcaccgcccccggccgggacggtttcccccgcagaagaaagggcaaagggggccggagtatccggataagcggtggaggaaacataacggttggcggcccgaagcaggcagcattcgtcaaagtagttgttcttcccagaggaatccgccacatccattcccaaatcccagtacatgaacccagccacttgctgttcactgatgtagcgagcctttttcctgaccgtatccacaccgttgaagtgcagcgtcttaaccttgcctccgccataattgaagctggcggaatccagagaaggatcctcccgcactccggcgcaggctgagacaatgtcccggtaagcccgaatatcggcgccctgccccgcgcccggagtcccctggaacggagcgctgagcatgatcttggagtccggataaccccatgaacggtacgttccgcatgcggaaaccatgctgctatatccgtttacatcaatctggggaatataattctggaacgtgaaataatccacataacgcatgcaggccgccgggaatttataatagtaggtatgcagggaaatggtaaaaaacatatccggggaagccgcccggatagccctggccaattctccgtaattattccaggcggccgtatcgttctggtcaatccattcgaagtccagatccagtccgtccaattgatgcttgcgtaccacttccgccacattttcggcaaaagcctcacgggcatttgcatcagacagcatggcggaccagttcccgccggagacacccagccgtatccgcattccggaaacgccttcagtcagcctgcggaggatacggacatgttccacccaggaagctgtatcatggccaaattggtcacttgtcccccagcggcccaccaacagcctgtctccccagctgtgctggacagccgcccccaggcgggccgccgcacgggcctcatgccacacgcgcatttcatcaattctgccatccaaattccttcctatgacggcattggcagttccctccatttcccccgcatccgcggcggccgtgcttacggcctccccgtccacataaaaggacgccgtatccgcagaagaattcctgacgaaggccagccagaaatacctgccggcttccacaggcggcaaatccgcctcccaggctttatccgggcctgcctgggtacggaccctgtaatggtcttccttccattccagcctcatggaaacgttatcattttcaaacagcaccgcctcctgtccgtctccgtccaaagccatacggacttccacggtaaacgctccggaactgccgccgcccagcaaacctccgcccacgttcatgtaagccccttccccggagaagtccaggacattggaacattccccgtcagacggcagcagaaccacaccggagctttccgtcacgtcattgtccggatattgaaaattgagagaaccgtccgcggccggcgtaacggaattgatgtagatcaaatcggaattattgatgagatgggcgcgcgccggccagtcataaataacatgcacattcctcacatacgccgtcaccagcatgtaacggaacgtttcattatccgtgacaatggaaaattcagtcccttcaggggcaaccgcctggtaagggcgcacaaaggcgctctctgtcttttccgcaaattccgtccacttggcatcacggaaatccccatccagacgccagcagcccaccagcctcccatacctgggatgggacaggggcaacgatccgttcaagaaaaagtcgtcttcctccccgcccagagccgcattccagaaacgcagttcatccagagcacccttgaaccccgcctccagcacaatccctttccagcctgatttcatggcctgcaggtaaggcgaccgcggcgaggaaacggccaggcctccgtccacatacagactgataacctcctccccgacggagacggctacatggtgccattcccccgcagccaattccttcccggcagctttcacggaagcgacggaatccccatccggagcagacagagccagacaaccgtgttccagggaaacagacgcatttcccaaagaaatgatttttcccgtgacggcatcatcattgggcctgacccagaattcacaggttaactggccttcagccgcccatgtggaagaaggaacggggagcgcaagagaagaaggaagaaaaatgagcgccttattgtgcaagacgctgacaggccggggatccggaacttccggagccggggaatcgtccgtactgacggtaacggcattcagttccatgcggccggaagcgctgctgtccgcctccttggtcacatcaaacaccagcctgccctgttcatccgcacaggccctccactccacagccagataagcgtcctgttccgatgaattggaaagaccggaaaattgattcccggaaaggctccccatggaactttgaagcccccgcacatccaccagagttccgctgaccagcgtcatggattcataagcaggcgcattgtgcccgcaaaagaaagataccgtatattccttgcccgcctggaatccggagaaggaaagcctggccgcggcggaggcggacggcatcccgttggcgctcagacgcatgctggtattgaaagcttcgcagccattggggaattcaaaagaagaaggcgcgtcagcgttcgtaccgttgtgcctgtgcttccccccttcataccaggtataccgggtattgggttccgccagagtataagaacctccagaactgcatctggcggagacggtcagggaaaccagccttccgaacaggcttcccactgccacggacgaagaagaagaagccgcaccattcctgattaacggaacggcaacaaatgtattggcgcctcccgatgccgttgctggcatggttacattgatccatccctcctgcgccgttccggaaccattacccaggtctatgccgaagccggacgtctccgccgcctgcaggacacagacgcctcccgcaaaaaacgctgtcagcaaatgggctgccctcttgaaaaacaccttaaccataaataccgtccgccattttatccgtccctgtccatcaaaccagaaaaaactgcgtggaaaacggataaaaaagaggggatgaaccatcccctcttcgcacaaaaccggcttggacacagcctgtccggtcaatcacctgtatgaccgtcatcagtttctgcggcggcgcagaagaagggcgcccaggccaagaagtcccagagaggccgtagccggttccggcactgcttccccggaaataagaatattgctgatctcacaccccatgccgccggcattggccacacgggtattattgaatattaagccaaaagaagaataatccgtatcagggtccaactgcaggtcgaaagagacatcaacaggctcattctgggtaagagaagctttggcattttgcaaagaccatgttcctatgaccgtggatgttccctcggccgtgaatccatacacattgcaggtataatcgcagttgaaatttgcggctccccaagcagaggtgtaagtaatcgtaaaagacatcttggctgactccactcctgaaggcatgtcaaatttgagaccggcaaaatttcccttgccgacatcggctactccgccgagttgaagaccaaggaaaccatcgtttaacgacacctggcccgacaaagctcttttcgttatagttccatgccaaacatcggtttcataaccaaagatatcctggggtgttattccgtcaagggatacggtgttctgagccccgcccccggttggagaaagatccagagaaaacgaggcagcatttgatagagaagacaatgccaaggcggctaaaagacaaagtgtttttctcatgacaaaaaaatccgtaccggatttagaatccgcattgcgaatgcaaagaatgaaacatttttggtacaaagaatgattcagtcattggcatttcatctcattatgtatgtaatgcattaataattaatctaaaaattattttcatggggagaagcgccgtttttcttcccttctgtgtttccataatgggcgaaggggacaattcgttttttttcccgttcgggactggaggaaaaaacatggtaacagattcagttatctacattttttgattcttttatgttgacaccggattctaaattcgcctaaagaaaggagagtattttatatacaaaaaggcgcaggcattttggatgcctgcgccttttcctctcccacaaggaggaaaaccgcatcaataattcaggatgccttccgcgaccttgcgttcgaagtcagcaacatctaccacctgcccgctcagccgggcgtgttccgtggcaaaggccatcacatgggaatgggcggattcctcaatggaagtggtcatatcttccggagagggcaccgtcagcatgtcatcatacagagcctcaatcaatccccagtcgccgccgccgtgcccctggtagcctccgtccagttcctccagctccaccacgcgtgttttgccgccaaagtggggcgtcacggtgatttcaccggggccgttttccttgtagaaggccccggcgcggattttgcctttggtgccgtacacttcaatgtggcgcccctgttcgaaagccgtcatcgtgaacgtgcccgtcaggcctccctcaaagcgcatgatggaaacctggtggtccggctggtcgttgtcgcactggaggtagtccctgccccacggggaggttttcagccattcgcagatttcttccgcggtagcttcctgcgcacggtcatacaccatccccagccagcgtttgcattcgtcgtccgtagcgtatttgcgggcgtcccaggggtcttcccccaccggggtggtccagtccgtgcagcgttccggccggggggatgagagcgtctttttcgtaaagaaggtaagctccccgaagctggcgacggaaaggcatttacgccggcccatgagccagtagaggatgtccatgtcatggcagcatttggcaacgatcatgggagtggaggtcttgctgttgccccagtgtccacgcacgaaggagtgggcgaagtgccacgcccccacgccttcattggcgttgaaggtgatgacgtccccgatttccccgctgtcgatgatttttttcagggtccggtaaaactgggtgtagcgcagcacgtggcacacggccacgcggcgcttcagcgcacgggccatatccctaagttccagtgcttctttcagcgtcttggcaatgggtttttccagcaggacatggtagcccagctccatggccttcctgcagggagcgtaatggtagtcgtcctgtgtgccgatgatggccacgtccgccaggcgcggctccgccagcagggaggcggcgtccttgaacaggcggacggagtcccgttcctcctccggggcaaaatcgcggacggcttccgtgcgctgtttgacgggatccgccgcggcggcaatgcgatagcggtctttttgttccatggccagcttcatgtaagtgcgcgtacgggaaccgcaaccgatgccggcgagagagagtctcttttgttcagacataaggattgttcagataatgtgggtaaagaggttaaagaacgccggatttgaccagcagcgcttccgcgtccggatcacggcccataaagtcgcggtagagttccgcggcgggcttgctgttgcccttgctgaggatgcagcggcggaaatcgcgcccggtttgcgggttcagcactccttccttcagaaagcggctgaaagcgtccgcttccagcacctccgcccatttgtaggagtagtagccggaggcatagcccgtgggatccgcgaagatatgcgtcaggcggcgagccacggaggggccgcggtccgtcatcggcacccggtagtccgccaggatgcgttcatccgtttcttccaacggaacgcccttgtaatgcggccagttgacgtgaagctccagatccagcttgccgaagcagagctggcgcatgaaatccgtgccgctcatataattgcgggcggagcgcattttggagaacagttcgtccggtattttttcacccgtttcatagtgggcggcgaagaggtgcacggattcacgctcccaacaccagttctcattaatctgggagggcagttccacaaagtcccaggccacattggtgcccgccagggacttcacttccacgtcggaaaggagctggtgcagcagatggccgaattcatggaaaatggtttccacctcccggtgggacagcagcgcgggcttgtcccccacgggcttggtcatgttgccgaccatgagccccagatggggaacgcggggttttccgccgtgcggaggttcccctacgctcaggcagttcatccatgccccggcgcgcttggagtcccgcggatgccagtccgcataaaaggaacccaggtgctccccgctttccgcatcatgcaattcatagaacaggacgtccggatgccacacctccaccgcgccttccggcgtttccccggattcaccgggtttgaacgccaccgtggggcgcggcgtgaccgtgatgccgtacaggccggagtagatggaaaagagcccttccatgactttttccacggagtaatacgggcgcaggtcttcctcgtcaaaagcgtacagttcgcggcggcgtttttcagaccagtagccggtttcccacggggagagtttttccacgggttttccggttttttcctccttgtatctgcggacggcttccatgtccttcaggaaagagggctttaccttgtcatgcaggtcattgataaatttcagggcgttggccccgctcccggccatgcggcgggaggtggcgtaatccgcaaagcagccgtaccccagcaaatgggctttcctgtccctcagttccaggatttcagcgatgagggcttcattatcgtattcccccccttttccgatggaacaggagccctcccacatgcggcggcgcagactgtccgagtccgcaaactgcatgacaggctggagggaggtgaatttctgggtgaagcgccagcggggctcttcttccgtgccgtggccgttggccagggcgtccaggcgggcggcctccttcacggaatccggcagcccggagagttccgcctcatcttccacaatgagttcccaggcgttggtggagtccagcacgttctccgcgaatttcttggtcttcagggagagctgggcttctatttccgcgtattccggcttcacgtcgtccggcaggtccgccccgctctcgcggaaatccgccagcgtttcctggatgaaacgctgcctgacgggggaaaggtctttcacccagtcacaggaggccgcggctttcagcaccgtccacaggcgcgggttcaacggcacggaggaggagaaagccaccacttccggcagcatttcaccaatggcctccctctgggcgggttcgtcattgacggagtccaggtgcatgatgcggccccagcccaggtgcagatcctcggaagccttttccagagcgccgaaggtgctttcataagtcagggaatccagcggctggtcacagatggcccggatattctctttggcgcgggagatggcttccgtgatgtccggcctgatggcctccggcgtaagccgcgaccaggaaaccagaaaggcggggtcagatagggatgattcatattgtttgatgtatgatgttattgaaaatgaaaacggacgcgttccggcatctgccgcaacagccatgaaaaaataaaacttaccatgtttcagagacatccggcggaacggtcgcggcctgttgggcatcttgatgaatgcggcggggacggaatccgccccttttttatcaccgcaggcttatttttcaagatgaacaagcttcctgccacgggattgggcgtcatgttccagcttgatgcggggaaatgccgtttccaatccaaaaccgggcgacagaaccgtttccaccgcttattccggattattttccggaagaacgggccttatccagggtctccagcactccggcatggttcgggaagcgtttcaacgcctgttcgcacaaatccgcgcattcccggaatttcccggccttcaggtaggcgcgggccagcacccattccgcagggtatggcactacgggaggcaggagcagggaggaaaaacgctggctccgtatggcctcggacatccagacattggcggaatccgggaacatgagggagcggatttcagaagaatacaggctgcccgtctggagacagcgcgcccagtaggagacgctcatctgcctccgggcagcgtccgcgccgtccatcagcagccgcagaatgccggacatcttgtcaaaggcggacgccacggcgtccgttctgccctgccttgcggcgtaacatgcgcccatgtattgggagaccactgcggtcatgccgttgctcaaatccggaaaccctttggggagagggcccggaaaagccttgagcacaagggcctgccggggaaggccgggccgggccagcatcaggcgcgcaggcagcgtcctggcctcccacagctgaaggagggttccgggagccagcggatgttttttgtccaggggaacggaagcggctctggaggcgatggcttccgcccttttgtaacggccggcgcagaattcggaaacggcacggtaaaggatggaacggaagtaggcgtcatcaagcgcgggagacacgttttccgccttctcccaggccaggcacagattttcagactccttgaacgcagcggatgccccttcataatcacccgtgcggaacaggcaatggcccagcaaatgatgggcggatgcggaaaaggggttggcggacacggccctgcgggcggtttccaccgttgccggagaaatggatggcgccacctcttccagcagggcgcgcatgaacagggcggcctgggagccggggcgttccttcaggacggcttccaccacgcggacggcctccttctgcccttctccggggttgccctgcccgtcaaagccgtcccggaggagcatggcgtaaaagaggggagcgtatgggtcgcgcttccaggtggaacagatggttttccacgcttcccgcgccttcacggggccatccatcagcagcacggccagggcatccgcataagcgcgttcccgttccgggcagtccgggcgcagcgccagctctttcatgcgcttcatggaatggacgcgctggtcctggaaggcgggccccgcgcccatcaggctcatgcacctgccccagtgggccatgaggcagtccggctccagacggagagcggcgtcaaatttaaggaaagccctcatgtccccgaacgtgagcagatgcgtcattccctccagcaccagcatttgcgcggcgggagatgaggaacccaccatcatcggctccacgctgggcggcagcacggcaggctgcgccggaacgccggcgcggaagacggcttcccgccagccgttcagagacgggctgttcatccaatacccgtgtgccccgtccgcggcggcggaagaacaccccgccacggcggcggccagcaggacatggaggaaagaggcgtccatacggaagaaacggttacatcctgtccgggagctggatgcccagcaggcccagcccgtgcttcagcgtgcgggcggtcagctcgcacagggccaggcgggagtgccgcaccgtcccttccgacttcaggaccgggcatgcctcatagaaggaatggaaagccctggccaggtcaaacaggtaggcggccagcatgttcggacggcagtcgtccagcaccagcggcaccacttccccgtagcgggccagaagccgggccagatggatttccgcgtcttccgaaagctgaatgggggcggaccagtccaaaggcccgccgtccagcttgcggaagatggagcggacgcgcacgtaggagttctggaggtacggagccgtatctccctgaagggccagcatcttgtcccagttgaaaacgtaatccgtcatgcggttctgggaaagctccgcaaacttcacggcgcctatgcccaccacttccgccacgcgcttcttttcctcatccggcatgtccgggctcttctcctccaccacgcgggccgcgcgttcaatggcttcatccagcacatcctgcagggaaaccgtatccccggagcgcgtcttaaacggcttgcggtcatcccccagaatggagccgaacgcgatgtgccggtagtccccgtccatgccgcggcggcgctgcgtggagaaaatctgcctgaaatgcagggcctgcggggcgcccactacgtaccagatggaatccgcgccccacgtcctgatgcggtagtccagcgtcgcgaggtccgtggtggcgtacaggaagcctccgtccgctttccggatgatgcaggggttggcgcgccattcccccttgtcctgcacgaggaaggggtcttcattgggaggcacggaaccgtcggaaaacacgcagatggcgccgtcgctctcccgggccattccggcggcgatcatgccgtccaccagcggggccagggcatcattgtaaaagctttcccccagccagtaatcaaaatggatgtcaagctggtcgtaaatcttggaaaggccggatttggaaacttccacgcagcgtttccagatggccaggttttccccgtccccggcctggagcttcaccagttccgccttgcaggtatccagcagttccggcttttccttgcacatcaggttcacatccttgtacacccgcagcagctcgtcaatggggttggcggccagcgcctgttcatccagaatattcttccagccccacagaatcatgccgaactgggtaccccagtcaccaatgtggttgtccgtaatcacacggtgccccacgaagcgggccacgcgggaaagggcgtcaccaatgatggtggagcggatgtggcccacatgcatcggcttggcgacgttgggagcggaaaagtcaatgacaatggttttggggtcctgcactttttccacccccagccggtcatccgccagcatggccaacaggcgcgctgcgtaaaattccggcctgatgcggaaattgatgaatccgggcccggcaatctccagggagcacacggcatcctgccctatccgatccgccacctgctgggcgagcgcgcggggattcgtgcggcaccgcttggcaagcaccatggcggcgttgctctggtaatccccgaaccgcaaatcggcggagggcgtcaccgaggcgcgaaaatcagcgggaagctcctctcccaacaccgcttttaacgcggaggacaacttttcttcaagaattccgggtatggtcatgtctgcccagatgaacggacattccaccgccgtagtcaaggcgcaactgtcatcaagacataccttttccggtaaaaacaacaggacggagatgacatccccgtcccagccggcgaaccggacgcccggcgcccgaatccgcccttcacttcagcgggcgcttccctaaaaggagcgcattctggaagtcttcagccacgcttccagtttcctggaggccctggcctccctttcccgtttcttttccggcacggactttccggagaaagccttcgccagaaccgatgccagttttcttttcattttcattttatttatattacagtttttgttcctccgcatgcgggggtttgggaatcatcccgccccccctccggggaacactgcctacatactgtaccaggtaagtttagtccataagaaaaaaacaattccttgtcatacttgatacaataagacgtaaaatgttcattaaaaacatctctccatcaactccgcatcccctgctgcgcgtcaatcaaggagccggccatcctttatccccatttcctgccgccgcgcgccataaagcgggctgccggaaacgatacgctgcccggaagccccaacagccccgcaccccatgattttccgctcaggcgccggaaaggcattcccggaaaagagcttcccgcttcattcccccctgaaatcatatttctccgccttccacaggaacatgcgccggtacaggtggtattccgtcacgcaaaggacgggcatgccgatgatgccgatgaacggcagcaggcgaaacaaatgacggcacagaaaaagaaccaccatcaggaagctttcccggtacacggtcatgtacagggaatacgggttgatgagcgttctcctgtacagggaggaagccagcagcggccccaaaatgggaaccacccccagcacgaccacggcagcgaaggtccaccccctgcggcggccaatatacgcatcataccggtgcacggactgctcaccctggagcaccgccttgccgcaggcggggcaacgctggtcaagagagggctcacggagaggctgcccgcagtaaaaacaccgccggtaactgcggagaacttcctcatgccttttccatccggagggaggaaccacggtgcgcagcctggaatatcctatccagttcagggcacggggggacggattgggcgtgccgcactccgggcagtgcagcccgcacgggtacatcatggagccgcatttggaacagaaaatacggtgggaatattcccggcggcggcaaaaaatgaagaaagccccaagccccagcccccccagcagggccaggatgacgactacccccgggtacaggagggaataggctaccaggtattccgaccaggaatggtccgactggtgcatgagggattccggaccgatgggattttgcgccacgtccggaagctggcttacgtatttttcacccatgtccctcagaggccccgcgggaagccattgttgtatgggaatgggttctttcatgactggacatgcagggttcgccataaaaacagcatttcccggaaggctgtcagaaaaacggcggcattcagcataggatgtctccgccggaataggtaggggaaaataggccatgccggaaaattccgccggaaatggggaagaggcccttttcatccggcgcttttccgtgtaatatttctgccatgccgactctccgccaagccgccaaggacgacatcacgctgatccatgaactggcctgccaggcttttccggccacataccgggacctcctttccagagagcaaatagatttcatgatggactggatgtattcccccgccaacctggaaaaacagatggaggaggggcatgtgtacttcattgcctcccatgagggaaaggactgcggctacctgtccgtccagccggaaggccccggcgtcttccatttgcagaaaatctacgttctgcccggcttccagggcctgcatataggaagctttctgttccgccacgccatcagctacatcagaagcatccacccggaaccgtgcctgatgcgcctgaacgtgaaccgcgataacacccgggcggtggaattctaccagcgcatgggcatgcggaccctggaacgcggggatttccacatcggccacggttactacatgacggactacatcatgggactggatatagcctgaaacgcctctccctcagggaaaaaacagccaaatcttcccagggcagggagtgccccggccgccccccatccccggcgcatgcgggccgttgaacccttaggaaactccagttgaaaatcccgcttcctccttgacactcaatgttgaattcttcatcatccgttccatgaacgcctttcctgcctttattttatccggtatcatcgccgccatggcggttcccgcctccgcccaggcggcggaaagcaaagtcacctatccagccttcaacgacggcagccatatccacgggccgaaactcaaagcttccgacctgaaagggaaagtggtgttttttgaatactggggcatcaactgcccgccctgcatcgccagcatgccgcatctgcaggaattgcaggaaaaattccagtccaagggctttactgtcataggcagccacagccagctcccgtcccccagggtcaaacagtttctggaagaaaagaagatcactttccccatctatcagagtctgagcattccggaggctccctgcccgggcggattgcctcatgccgttctgattggagccaacggaaaagtcgtggccaagggctatcctccccagctctatgacctggtgaaaaaggaagtgatgaagatggaacgcggccttcctattctggaaggagtggaactgaacaaatacaaatcgctggccaaaacggtcgtttccaccggcagcaacatcgaatccaaaatcacacctctgaggaaaaaaacgaatgacgaggaagcgcaggccgtatgtgaagcttttgacgcatggttggaaaataccaaggaaatcgtgcaggcccggatccagtccgaccctctggaagcggtaacggccatcatgcgcctcaaaacggcggttccctccgtcaaggaatttgacgaacctctggcggccctgaaagcgaacagggatttatcaaaactggccgacctcaataaaaaaatctccgctctggaacagcgcaaggcaaaagggcgcaaaatatcggaatccgaccttaaatccctgacgcaggccgtggacaaattcacggagtccgacaacgaagccacgcaaaccgccgccgccagcctgaagaagaacctctcctctctggccgctccggaaactcccgggaaataaccttcccctccagcagccatttcctgccggcaggcgtctaagggtgcctgcttcttttttcaccggacgcctttttctttttcccctccagaacagacggaacagccagaatggagcatgtctccctgacaagggaggaaagggtccggtcatcgtccagatccgtcaccaggaaatgcggcctggcgccgggataggggcagccctgctcctgttgcggaaacatcttcaaacccgactccgttatcttgacatacaactggttgtcacacaccaaaccgaagaatgtccggccgcagtacaatccgtagtccccaaacatttttctgaaggaaatatccccggcatgccggagctggaaacaaatatattctactacatccggggaagaggccatgacgaactctctcatgcctcccccgtccgctgcaagaagcaaatgacggccgggaaggcttccggcaggaatgaggcatccccgttattgacgggaaaaggcgcagcatgccccacggagtcatgacggacggcatccatgccgccgcggccgctccgtaagaagatcctctcccgcccctgcccggcaagccacgaacagcggcgattccgtccgcacggagccattcttatgattgccctgacgaatctttttattcatgatgcccatgaaccttccatgaccgccgcgtccgacatcctcaggaaaccagcctgcatctcccgtcaggaagcccccacccttacggaaggggccggaacctgccggacggaagacggcgatcaaaacacctccgcgaaccgtccggaaagccataaggccatggggaagaaaggccttgcggagaaacggaaaacacctcgaccgcggagcgggcgcgtcatcctgctcaacggagcctccagcgcgggaaaaagcacattggcccggaacttgcggcttctgctgaaagaggaagccatgattttctccatggacgattatctggccatgagccagggaaagcatgaaaccgccctggatgccgtcagggaatccggcctgcccttcattgaatctttccacgccgccattgccgaggcggcccggaaaggcgccctggtcatcgtggaccacgtcatcggagaatcccgccgctggattcaggacctcctgaaccgcctggacggcatcccccgcatcctggtcagggtggaatgccgccaggatgttctgctggagcgcgagcggcgccgcactgaccggactcctgccccggcccatgcccagcgccagcacgcaggcatccaccgccatttcccgcatgatttctccatagacacttccgcagacactccccggaaatgcgccatgcggctcatcagcctcctgccgggagaattcctgccctgatgccgcgggaacaggtggaagcctcccgtttgaaaaaacgggctgttcccgcaaacatgttggaaagacatgaataggactttacagagccgtctccttcacggtagcctgtgcccgtgcttgttgcacggagagatggcagagcggtttaatgcagcggtcttgaaaaccgccgtggggcaacccaccgtgggttcgaatcccactctctccgccaaaagtttctgtaagaaaacctacgtaaaccttgataacgtaggggattatgaataaggttcgtgtaggttttcttacgcgaaccttattacaaaaccattacagaagatattacaggtatgagcaaacctttttacaaggggcgtctgtccatcaacaaggaaaaatcctcgccctactggatggtgacctttcaggggccggacggcaagatgaagcgccgttccacgaaagttcctgtgaatggcggcgagtttgagggagaccgcatcacggccaagctggcggaacgtatcgcctaccagcggggcgtgcagatagcctgcgcggaagcggaagaataccaggtgcacaacaatgtttccgtgcgtgcctggtgtgacggatttgttgggcgcaaggcggctcttgtctccgaacagacggcctacaatgccagaaccgcctgcaagcatttttacgagtatctgggagcgcgggcgaacgccccgcttcgcctgatcaccaaggcggacatcaagggctttgtggcggctcgccgcgaactggtgcggcaaaagactgtgtacaaggatatgtccgttctttcccaggcattcgcggatgccgtggattcagaagtaattgaccgcaatccgtgcgccggcgtttccattcccccggaccgtgccggggaaaagttgcacaaggaagcgttcactattgacgagatccgctacatgattgagcatttcccgcccctgtggagttccgcggtacgctgctcgtttgaaacctacggccagcggctgggggatattctgcgcctcaactggaatcagtttgactgggaacgccgcatcgtgcgctttgacacgggcaaaacggggcgctggatggaccagcccatgagagaaggcttttaccaatgggcgcttgcccgctggaaggaagcgggggaaccggcggatgaactgcttcacgcgcccctgctggccctgggggatggcgcgtcctatcaattcggcctcctgttgcgcacccatggcatcggcgtggtgcatggagcggccggcggccgcagacggaggatgaacagcaagtccttccacagcatccgggccacggcggccacgttgttgcaggcatcaggcgtatcgcaggggctggccatggagctggtggggcatgactcttccgccgtgcatagcgtgtacatccgcccctccgcggatcagctgcgctccgctgcggaatccctgccggaacttctgccttaaaaaagccctgctcccaaaaaggaaacagggcttgctggaaaagcaatatctgcttacgcacccatcagccgcatatacttggccctcacctcggcaaaacgcggatggtcgcaatcgtggaatgctgaataatccgggtgttccggatcgtgcatcatgcgccgggcttcgccgcgggcctgctgttcctgccgtccgaggggcgccggaagagccggctcgtccagaatccggcctactgcatccagaatcctgtacatggccggatgatcggcaatgcccatctcattaaacacgctctggtcgataccggccatgcggcacaacctcccggccatttgaacggcgcgcatctggcgtgcgtcgctgtcccggccccactctccatccagctgtctccaggcctcttccatggcggcatcctgcgcctgcttctgttcggtcgctttggccgccagacgcgcatccatatccttgataaacgcggaaagcccctcgacaggaagcccgtgggccttgccggtctcggtcagcaactgctgcagcgtctcgtctccggaaaacgtatcatcgaacgtcaacacgtaatccccctgggaaggcggatctccctgcggagaacccggatccgatgggggaggagggttcggctgctcatcatccgccggagtcggctccggtgcaggattagccaggctgggacgtccggaagcggaaggggcggcggaacctcctccgccaccgcctccattctccggagcctcttcaaaaagaaaccggttatggtacaacttaaataaaatcatggtacttcttctatatctcttcttctggttcgtaatgattgcccatgaccgcttcgatgaacaaaaccacctcgcggtaggcgtctcgacgcatagcgtcaagggggtcgtaagaaccggccttcccctggaaacagggaagatcggtctggaaatgtctcttcagctcctccaggacttccggattcctgaatgcttcccggaaaatccttctgcggcgcttcatgtactgttcgtacttattggtggggtccgtcttcatgtcgtttgtaaagcctgctgggcctgggcattattcctgttagccacggaggactgttcggcaatggctgcctgtatggccgcttcctgctgattcttcctttcagtctccttctccttcacctcatcctctgtcgccttgcactccatcggggcgcccttggaatcgtaaatcaattccccggccttattgagattcacaatatccagcagctccggccggccggtcatctgcgacaaagtgccgatagactcaagagccgtcatcaagccgtccgtctgtgtacgtgcaatcgcctgggcaatcttgcccatgaactgaacctgggggacggccagacgtgtaggagcgccccgccggttgacctcaaacacgccctgaaccggctccggaagcttcccggcgcggtacaacagggccataatacgctggcacatcatcctgaaatcgctcacaaacaacgtaaaagaaggcgtaaacccaagcaccttctcggcttcccgggccgccacctccgtagccgtcatctggcggtcgatgcgggaaacggtttccagcatgggaacgtaaaaagcctcttcaatcttggcgtacaggccccgcaggtattccagcccgatatcatactccccttgtgtgccccattcgcgcggcaagccaagttccgccgcttccggagaaatgacggtttggcctccggcgcgcaaatccacctccccatactgctttgccagcaggaaaagcctcggataagcctttgtctgtcccagcgtgtaaagaatcttctccatgtcgatagccatgcggatcgtgcgccgcgcgaaccatgccggtcccaccccgtaggggctgtctccccagcgcagaaagcgcgtcaccagaaacggaaattcgaaaaaaccgctctcaaacacaatcttcttatcgtccaacgaaataatgacgtccttccacgctctcttgccaggcggcacatggtcggacaacagcttgccctgcgggttaggcaggacgcattgcacaaactcgaaagaatccgtatagcgtctcctggcatccttgagcgctctccgcacttttgggcccagagcctcctccttccacttctgcgccgcctggtgagccgtcagccggaaccagcgcaccagcgtatcaacatcccctgactccgactccgcgatagcgtaagttcccgtgggaatgtgccggaaaatcagctgcctgttaatattcatctcggcaaacatgcagccggttcccgtcaggcagcgatcaaggtaaacctcatgaatcactgaataaaaattggaaacggcaagttcccgctccatcacctccgtaaccttgctgtaccaatcattcaaagcctgattcccatccttattaaaacctaccgggcgcaaggtaaaccagcgcctgtccaaaggcgtaatataagtcaaatgggcggatgccagcttcttcaggctgttattggcgacgtcgctatgctccaatccgccgctgtgatcaggtacgcggtcgggataagcgttgcccgtagccctgggcatgataatacggcgcatttcatcccagccgccttcaaaagcggcgcgttccgtgcgcagattatctgccagggaaatgtaatcgcgtacctccatggctgctatcccagggttttgcgcaacgtggacaaaccgccggacagattcggattattcaccgtatcggacagcttcaacctgcgcttacttttggtctgaacatcctccgaagcatcggaaacagacttctccgtagccgtcggattcagcggctcttctactaccggcggagccggagcctgtgtcactttaggtttgaaaatagatcccataacaactaatgatgaaaacaactaaacaagctcctgcgccacgctgaacgcatcgtcacagcgggtcagccagcccttcccgaacacaggaaactgcttgcacgaacggtaaaacgcctgacgcttctcctgcagagcgataaggaacaccgcttcacccgtggcggccagctggtcctgtagttcctgccgggtcttggggccgacaatcccgtccaccacaagcccggcgccgtggacattcagcgcgcgctgcaaaatcttcccggtattcctgctcccggaattaaaaaaatgatcccgcaggatgaattcaacgccaggaaaagcgtcggaacccagccaggaacgcacggcggcggtattatccaggacgtactggagacatccctcccaggcctcttcacgccttccggcatccagcagggccttcaatctgttaaacacggccggttcaatgccgtcgcaaatgccgcaaatctcccacttgccgcccttgtcggcggcaggaaggcgggaaacgcgcagggaatccggcccggtaacgcggctgtcttcaaaccggaggatagccgcggccatctttctttctgtagtattcattcgttcaggttatcgataagttgcacaagctgcttgccttccacggtgtagcaatggcacttggcatgcaaatgccactcattgaattgagccaggaaaaaagcggcgtctctttcggtaagaaagattttcatgaactgctcctttccgggttcgtcaactatgagaatgtacagggtaggcatgcaaaaactattggttattaactaaagggaactggtaagaaaaactttacagttggtcagtgttcatacatccggaggaacacaagggacgcaatggggaagcagaacgcggaaatgcccgccgtcgtatcgccgcacgcggcaaaaacgccggccatcacgcaccccatcagcggcagaagaacggaaggggtcagcagcttattcaccgctgcggcctcctcgctgatgttccagggcggaaagccgcccgtccatgatccgcaagatctccgctgttttggcagccgtctccgcctgtgtggcggcaagggctcggaaatcgcaatacacgaacacgcacgccgcgatgccgataaacatcacaatcgtatccttatattcccgcacaacggccaaatattctttaaggggtttgcacatggccttattttttggagggaattacctgcacgacgggcggaacgtccgtttccggttgtgcctgggaataggaaatatgcccctgctcaatgacgaggcaggagccgtccttgcatacctccgtgcggttcggggtgacatccacggaatgaccgcagccgggttgcgtcagaatccccgcggcaaccagggccccaatcacagctccggcaatgacttttgcccaactctctttaataccccaaccggtcaggagaccagtcagccaactcactttttctttattcgtgctcatattatttagtagtgaaatgcttaaaaaacgccacggcggcgggatccttgattgtgaactcctggtattgggccggggtgaaaattcggcgtcccccttgctcattaaccgcctcaacagtcaatgatatggcctccgccatttcaaatggcccatcctccgaaataggccaactggcaagaacatgatccagccgcgcccatacctgaactgcctgccaatcctcacccagtcccaccagagcggcaactaccgcctgcatggccggtgcctgctccgccggaatctcgtcctgcgtatagcgggccggaggtctataacctcccgaatcctgataaatgggcgtcaaaatgaattcatcccattgaccaggctgcgggaactgtatttgtatctcggaattattcatactcaatcttcggtagtcgtttcggcttccgggtcaacaaaatcctccaccgcctcggagacaatgatattgctctccatcgaggaaaaaccgtaatacgccggattgacgttattgcaatgcaagtgcatcgtcgcaggaaggaaagctccggccaacgcccagctgttggtattctccatatcaagataatatccggaaaagggataaatactctcaaagcaatggactcccttcaccgtggcgattttgacgcagccgcgggaggaattcccgccatgcagcagccacagcgcacccctgtcttcggtatcatatcctccgtcccggtattgctcgtaaaccaccgcgtacacgcagacgggataaccggtattggaagacgtctccggcgcgatggcctgcgtcgtcttcatcttccatttctgctcggcattggaataatagatctcccggacgcgaatatgataccctcccgcgtccgcgtcccggacatgatcaaacgtaatatcgataatctccccaatcctgtagccgccggccgcctgatccggcaccagcgtaaacgcgtccctgtcccgccccatgcgcgcaaccgttgtcatctggccgaacctggccgtgaatttcgtgctgacagacggcagccgcagcggggccacccacccccggatgctggaataattgtgcatgggcctcgcgttggtcacgaggccgcatttcacggtaaaggcggaattgggagggacattgaaataaagggaattgggttccttgtccgttttgaaaaccgtcccattggaagacgagcaatccgccaggagcggataacacctgacggaaaaagcgtcagttatggcagccagcccggcggcgtacaggcgattaaccgcgcccgtatcggtcggcgcaccgacagccagcggaatgttgacgccgccgttggcgttaatagcccccgccgctgtcaggcctccggccagcgtcatgttgccggaggcgtccacctgtggtatggcctcaagggcctgttgggccgtcgtggcggaattggccgcggcgatggcggatgtttcggcattagactccgccgtattgatgcgcccctccgcctgatctatagcctctttggcggtttcggcgcgctgaacaaggggcgtgaccgctcccaccgcttccgtctgcgctgtctggacggcttgaacagcggtactttgcgcgccggctatattctgctgcgcggtctgtgaggcacgtcccacggcaagcacggccgccgcttgcttatcctgtatggcagtaacagcctcattcctggcttcaataatctgttgcttcccggtgttgaccgtttccggccaggtggcggccagcgactccacagccgttttagcgtcattggcgctcttggcgtcacgggctgcgttagttgcggacgtgccggcggcggtcgcagaatcggcggcagcacttttggaggcccaggcagaaccagcatagccttccgcctcttcggcccgtgcagcagcggtggctgccgcatccgttgccgtcttggctgcctggctcgccgtttccgcattggtggaggatgtgttggcattctgttgcgcctgttgggccgcgataatggaggccgtgttggaaagccactgggccttgatcgtcttacttgcctcaacaggtatcgtaatacccattgcaggaatatcgtacaccgtggacgactcaacaggagccacagaatccacggccccaatataaccggaaaacagcctcaaatcctctccggactcatcctgtgcatgaatggcatacggccagcggccaacaggcagggcaggaaaagtaagctccaaacaatgttcttgctcgccgtgttcaataacaacgggcaagtctccctgttccgtcttcaccacaccggtgaaagaaactcctgttaccgggaacggagattgcgtcacatcctcgaacaaaagccagcctatgcgcttggcatagcctgccgtcgtggacaaatggcgcgtcattcccagaaaatttaacatgactcaatcatgagccacaaaacacgggaaatgcaagttggcgagaatcaacgtttttatccctgcttcacgggaggctcaaaaggcagggaggacagcagggttataaaattctctcctgcatccacttccatcttctgcggagtgtatgcgccatccatcttgttaagctcggcaatagcggcgatttttgagggcatcttaaatttcgctccggtttcgtccatggaaacctcctgacagagatcggatgcgctatcaacattgccgatgggagttgtcaccacgcgggacaaccattccatgcgctgctgcctggtcagcacagcagacttatccagttgcttattcaattcgtcaatcattcgcaaaacttcgccatctttggacaaacgggatgccgccttgctggctgcgtcattactcatatccttgcgattgtaagccttacgataggcgtccgccttggacaacttttccgcaaccagaagcctcgcaaactccttcttcttctcggtcactttggtcttgttatccttccttctcataccaatattttaccctcctgattttcagcgcgtcaatttggtgagaatcaatacttcttgcccgggacaatcaacctgttggctttgaatcctcaagactctctaaaaaatcacgcccctgcctgctgatataaaacacgcaaggccgtgtgccggttctgatcacgtcgccggcctgcaccagataatccagccggtgagacacattgctgggatccaaatggcaacgggtggcaatctcccgcgacatcctgcccggatggtctcggatttccatcagaataagcagctgcgacggactcaccttccggtgtataatgttccttaatagattcttgttatcagacgatttattattcataatatcaaacctccctgtaagtcgtggcggcagcatcccactccagattgatgtgcccggtgcttccaaagcggttcttgccgataataaccttcgcttcctttggatcggcgtcccgatcactggcaaagggtctgtagagcagcataatctggtcggcatcctgctcaatggaaccggaatccctcaaatcggacacgcggggaaccccggcatcttttcctgcccgcttctccacctcccggttcaactgggccagcacgatcaccggaatattcagttccttggccagggctttgaggccggcggaaatctccgacacctcccgttcccgggacgcctggcgtccggtaggattggcaagctgcaggtaatccacgccgatgcacctcacgccgtggtccgccaccatgcgccgggcggtcgcctggatctggtcaatccgtaaggcgggcctgtcatccacgaagaagggaatcccctttacccgacgaacagcgccagtaaaggcgccctgctggtaggtggtcagcttctgcccccgccgcaacgccatagggtcaataccagactgtccaaacataatgcgctccaaaatctgcaccttggacatctccagggaaaacatgcctacaggacttcccgaactggcaatgttaagcaggatgttggtcatgaacgacgtcttccccacagcgggacgggctccgatgacgatcatggcggtatcttgcaggccatccaaaacgcgatccaacttctggtaaccggtgggaatcccctttacctttccggggtgcttgatgcggtattccatgttctcaatcacctgctgaatgccgtcgctgatgttgaccacggcttttattccgcaagcttcccgcaaggaggacatcaccttttcggcttccgccagagattcttccgcggtggaggtcaaatcctgaagcttttccaatccggagatgaacatggtttccacatcccgctttttcttggatgccgtcaaaatcttcacggaaggctcgaactggaaatgataggcaaaactcgtcgcaagctcgacaagcccggcgtgacctcctacggattcaagctcgccggcggcttccaggtgctggatcaggtcggtgatattgaccttttccggcgttcttgccagagtctcaaaggcgctccagaccttctgatgggctgaaagggtaaagtgagatctcgtgaaaccttgttcgatcagggcggctaccttgtcggcgccgtcaatacagttgccaagaacggtcttctcggcgttgagttgtgtttctgtaagttgcataaagtattgaatgtttgttattagaattgttttccaaggtcggcgctatccgggaatgggtcggaaccaaacttctgtttctccaggcgtttcctgtcctgttccctgtaggcgtcgtcctttgcccaaatctgggcccggcttttccagttgcggatgaagttgccttgctccacatagtggtcgtaaaacctctctgcggaacttctcaacgcatccgggtccaggggatggacaaagcattgacgcatgtgtgcctccacttcctcgacggattccggcaatggaaccatgggagaaggtcgagagggtgggggaaaatcaagcaagccgtcaggcgcagcttcctcttctcttctctcctcttctttcctttcctttcctttcctctcctttgtattgccggatgtattacaatcggcattgttatctgcattgcattctgtaatgcgttttgcattacccattgtattacaatcggcattacttggtgcgttgtcagcatcttctcttcttccccagcgagcttccgccgctttcttgccgccacggcgtttgctcaaggctttctcttcagcttcaacattgtagccttcgacgattaaatcatctccgtcccaatgaaaaaggccaggggcatcttccggacaatcttccaaaccgatgcgaaacacccactgggtccccattcaggatttgcagcctcgaataacacccccattcacctgttccgcgcaataaaggcagagcaagtaatactggccgacgagaaacgcgccatgttctgcaatggcggatcgtgtgttgacaaatgaagaataatacttcaatgcaccttgttgcataaattctatggtgtacttaaaaggttcagttcatcacacctcttgcggacgtaatccagcaccgcgccggcatcctggtgtttgatgcagatcagaaagcccggcttgccgaactcttctacccaaaactctatttccgggcctgtaaggtcaaaatacacgccgtagcgccctgtacgccccagttcccccttaatgcggcaaagctcctgaatacagcggcgttcttcctgttctggtgtttccataggaaagcaaactgcttcattttcaactccagcacggatgccgcggcctgattggtcaatgtaagggtatttcattccccctcctttctcggctcccaattgcaggaacttgcaaggctattgaaaatcatgcaattctcgcaaatctcggaaccgtcgtcttcttccaaataactacaagtccggcattcccttttctccaagggcacccacgccctacatatggcccgcttctgccatgcgtcgcggatgagtgcatttaatccgcacatgttgcgctgcatatgccaaaaggcaagccccatatcgggcacatcaacaaacaactcttttaatctgtgcgctttgagccaagcgcgagctcgaccgtattcgtaaaaagctttctgttcaggcgtcatgcggtcctcctttccgtggcttgttcaaactcgaacacggcctgcttgctcaactccaccatgaatcatacatcatgaggggaaaccaacaaaacttccccactgaaaagatgcaccagcaacctgctgggggtagctcccttcacacgggctctcctgccgcatgtcaccagaacacactgtccataacaaaaactgatcccgcaaacacgattaagggtttcaagttcggtttgagcaacaagctcttcagccgcctttttctccttctccctcttctgcctggcggcctcgtcccgctttctggcagcttcggccgcctgattggcgcgcaaaatcgccatggactcgcgttcggcctgctcctgggtcttcgtgagtcccgcctttttgcggagcctgtaatctctccagattcggcgcttcctctctctttcttcaggcgtcatgctcggcccctcctttctgtttgggagtgtacatgtcagccatgcggcgcctgcattcacagcaatccgccctagttccattttcaaagagacaacccgcgcatgagtcttcctcggaagcttgccgggtttccccggcaagatccctggtataaaccatgcgtaccaattccttgaaatagtcgctcatttgactggctgtgtcttcatcatgaaaatcagcgcaaatacccctcaatgccaggtatgccaaatactcttcttcagtagagcagccgtgttcttccttggtcaattccgcaacatcccaataattatcacagagaggaaccatcaaagtaacaaccttcatcacctgtgccctcctttcatggaagcaagcgttgcggcaagggcgtggtttgatgttgagtcttcggcaaggtagaaggacttcttggcgctttccaatgcgcgcccaaggagttctgttgccatgagataacgcgtctgcttcatgcaaactcttccttcatcccatcggatgccgccggtattgatggcagtgaacgcagcaagaacatcgctgtctttttcatctatttcagtcagagcaaaaaaagtcttccgcctcttgtccaaaaccttgaaaggaatattctcttcaaatacctccgccgcattttgcagaaggaaggcggcctcctcgaaggcttccttcacgccattgacaacctctttttggtcgtcatcggcatagaacaaggcatggaacatgtccaaaatggcttctgcagcgccccggagcatgaaagcattgtctccgaaggctatcaaatcctcttcatcgtaccgcttcttcctgggagcggcaggcttcttggccgtcctggcagcctttgccggttgacagggcttcccgtctgtcgtacttactggcttgtgagcaatgataggattagccgtcttgccattattcacaacatccgcccctttcccgttgccgcgggagaggggttctgcgtttaccagtagtgctgtagttgtattcatagcgatcataatcttatttattatcaattaactattattatttaatcaggttcaatcgacgcgccccggacagaggcgtgaagaaatagttagtcttcgtcgcacaaggagaagccttcgtcattcaattcaaagacgcccagccagggagccttgataaaggcgacgtagaaattgctctcgtccttgcgccgcaccacgacaaattcatcttccggagaaaaacgataagtccttccacggttaggcatggtgataattaactgggaatttaacattaccctgtcgcccgtatcaaaaggctttgcctgaacaggtttagatgcagtatcaatattgcttgtaatcattgtattatgtattttctaatggttattgtttcctcatgccgtgagggcgggacggttttttccaagccgtcaaaagctttcatgggagtaggagactccggacaaaatccggaatgcgggctcttgccggcctgcaactcggcgttatccaactccatggccagccaaagcgataacgccatgaacaagccacttgcagccgccgacaacatttccagaaatgtcttcatttgttcactcctccttctccatattctcggagcaacgcccggcggaactgcttgccgtgcaccttcatcttcccctgcttgccccagtacaggatctcgatcacatgccccttgtccttcaactcatggacggtcctcttgatcacatcccggtcggaatcgtacatcagggccagggtcttgcagtcgtaaaactctgattcagggtaggtcataatattttcattgttaaagctcgtgccagccgagcagcttcaattcttcgatcaggtcttcttccatggttcagtcgtcgtagtgtccgtcggggttgtcgcactggggggcgtgatccacttcccactggtcaatcgctaattccagctcgtccttgatgccctccgcttcccggatggcgacgtattcgccattcacccggatgcaccggtcttcgtcgtcgtattcgataatcattgttagaattgaatggtttagggttattgggtacactcctgttcatggattggccctcgttcattcaacaaactctcaaactgctcggcagtaaaaagctcgcagccatcatctgcgtaacctgggtacttctccacatcgcgcttgcatgcccttctcaattcgtccagctctcggcattctgcggcaatcaaatgtatctgcttgacatagtcggcttgttttccgcggcctgtttgatcatttcccttctctcttcggcaggcagattccttaagccaagaatacgccaaatctacctcaaaagaacggctgtaaaagaaataaagagcatcctcaaaactccggaaagcgatgactacaaactgctcatgctcctttacaataagcctgacagcctgtgcaacccttatgacccactcgtcatgcgcttgatgtcttaccatcttgtttgcgtcactgggatcgctcaagccgctgacttcaaaatctacaaaggccccttcaatctcactcactttgcccgccaatacatgaatacgcattgcaggcattaactgataaaaggcacccggattctttgcccggagcattatcaggcctaatcttgtaagagacctactcatgctgcgggcttcttggggttcttcgggcggggaagatcgcgggctgtggttattacaaacccaagcctttgagcttctcggataagaagagacttcatcacttctttgggccggatgccttgctcggcataggccagcaggcaattcttgatgccgtcctccatttcgctgaatttgatgattgagtacatggcgtgttacgtttgatgactcataaatacaccaaacggttatcattcgcaagaaataaaatcatcgtacagtgattttgtttcgtaagcgattattgacaaatcaccaaaatgatgtattatcaacgcatgacgccgaccaaggaagacattaaaaaatggcttaaggcctctggaaaatcccgcgaatggctcgcagaacaatgtggggttgacaaaagaacgctaaacaactggctaagcgtatcacgggaagttccctcaaaagcccttctcatcattcagcgtctcatgacggagaagatttctcccattcctccccaagtagagattgatttcacggacgaggaatgggaggtgataagcgcagccatgactgccacccagcaaacatttatggagtttatcaacagcgccttccgtaacgcgctcaaagattttgcggatatagctcttcaaaatgccgctaaagaaaaagaggccacccgtaagaagttcaccccggtagaaacatttccagcagtcgcagcttctttggattacaccactcaagtagccggcaacacggcagccggcaaaccttcgtctggcgagactgtcccgcaggacatccgtatttatcgtcctcttgaatggggagaattcgtcttacgagtcaacggcaaatcaatggaacccgaaataccggacgaatccctggtcatcatcaaaaaatatgaagactacctgttcccagcactgggatccctggtagtctataacgaaggtaatgactacaccctgaaaaagcttgccaagcgtaaaaacccggaaaccgggaaaatggaatatgtcctcaagtcgatcaaccctgcttataaagatgtggaacctatagcggagggtaaaatctccggcatctatgtggaaaccctggacaggtgggaaaaaatttaataatacataaattatatggatatatcacaatttgtatcagaaactattaagcaaatttgcacagggataaaagaagccaaggaagcttgtaaagaagaaaacgatcctgtagctcctgttgcgattaaaggggtacgattagatgaaagtgtccaaatgattcattttgatatttgtgctgttgctacagaagagaaaaaaggcggtggcggaatcagtattcaaataccaacaataataaatggcgaaataggcaaaaatacaaatatacaaacttcatgtactcagagaattcaattctcaattccatttatcccttctgcatgttcttccaaaaaagaaacagctctttctccagaggagcctaactactggacatcttcaataagtaaaaaaaaatctaattcgggtagatattagcatcctcccagaaaagtgctcctgttcatcccttggcctccgggtcaggggctttttttgttgttctttgtccaaaaaatggatagcgtacgggcatgtctatgaacgattctgctactccagaagaaaaaaagaagcctggttggttcgcatccttcattatcctagctattgcttgggttcttgtttcaggttgttggcatgcttaccaacttattaccaacacatatactcttcccgggaacatccttttcatttttgaatacttccgtccagaaaacatggattataaaaccataaataaacaaacaatcttcttttttctttcattgaatgaaataggagtagttattcttaatttgcttccagcctttcttattcaaagaggcatcataaaattattttgtaaaaaacactccaattaaatactttagctacttccggttcccagcccacttatccaagtctgctccattttgagcaacatcattagtaatgatgttgctcaaatcaatctcacttcccatccaatcttaaagggagtcctttcatggcgcgaaggaggaactcggtcaggttgacgaaagcggcggcggaaaaggcggcggctttgaacctggcccctttaggagtggaagctccgcccagggccgcgccgaaagcggccatgcgcagggcgcccatgaaagccagcggaaaatccacccaatctttatcctccccgtcaaaaagcctggcgagatcttttccggcccgttccaggttatcccaggaagcgaacggaacaagggaagtggtagcctcgtaatagcggtagccgcacagggaagacatgccgcggacagctccgcccgccagcgcgccccagaaggggatcccctgcaggggcccctgaacagcgtcaataaaaatgtgccaccattcccggcgtttgcggcgtctttcatcatccgtgaaaaaattaagcatggcgctcatagccgccagcagaaggccgtgggcgtaaaacatgctgacggacttcgccttattcttcatcccaccctgcttccagagggcaacagtctccgcaaaagtattgatgctctcaccccccaggaaaagcatgccgacattccagacggagcgcgtctgcgccgccagggaccgctgctggggcgtcataggctgggccttgcgggaaagggaaagctccacctccatcatggcgcgcctgtccgcctcctccctgcttaatccggggttcctcttcatctccttccggtaaacggcgtcataaagaatggcggaactcacggcattcaggccggcgtccgtctgggtcagcaggttcatccctttcacgttcatcctcttccatgcgccggaggcggcccggcccgcctcgtccgcgctcatcgcctcccggatgacggccgtctccgtcgcgtctctggcgtccagggcggcccgcttcatcaactcgcgcggggaaagcgtcagcttgcccgccgccatgcgggccatgctggcggcccattcatggggatcaatctcatccgagctgaaagccgcgttaatcagggcggtggactgcttgagccacgtgcccacgcggcccggcagtagggtaatggccgccgcggaactgatgcggttcaggctcttctgcatctccagaaacccgcggacgttccccgccatccccttgtcgaaggaatcgcaccagaccagcagcttattaagcgcgtcccgtccaataaccttctccagaacgcgcgcgccccgcgtcccgttttcgccgcggtaattaataagggcgcgcatatcccggctgatttccgagccatacaggtaaacatcctgttcattcatggcggcgtaataagccgtcagcacgtcaatactcaaatcaagactggcatgatgtttcttccgggcgtggataagcccgaacttcccgcccgtggccgcgtccccataagaagccgcgtccatgatggactggtcaatcgcttcaatacctacatcgaaaaacgcccggaaataattctctatcatcgggaaaggggcgccgtaacggctctcggtcacctccttcacctcctgcccgcgctcgttcagcttctcccggagggcgcgggaaaactccatcacctcgctcccggcaaactgctccagcccttccagtatttcctgcgtaaaccctttcaggcgcagcatctcctgataatcctcctgctgggaaagcaggataatataagcggcctccatccggctgatatggtcaagcttgtaagactgggcctgatacggactcttccccttgccccacttgctggcctttcgggctctcgcggcgtgttcctcaacgtacttctcctggcttccgtaacggtcaagctccttctccgtaaacacggcggcatccttctcgctccacacttcatcccgcgcatccggccagacgcgttcaatctccgctttcagctccgcgtccatatccttcatcaaaaaggcgacatgggcgagggtcctggccgcgccacgcttgcggactttacggcggatcaaattcaggacgcccgcgcgatactcctcgcgggccttcccctgccaatccggttcctgttccgtaacggtcaggcctgtatccaggcccctgcgctgctcgtaaatccaatccgctatctcgtattcatcctcggtctggagaatgcgtcctgcggccttcttcacgaacgccagcgtatctttctcgcaagcctgcttctgcaccgcaaaccgggccgcccggcgttcaaactttttggcaatccccctgaacgcgggcacggactgcaacccctgcatatactggctgaaattgagcaaataaccggtcagggacatggggccggacggcagcgttttcaggcgggcctgtttccggtgggtagccatggcctggtcatccgttctcccggcggcctccagcacgggccggagcaaatcctcaatctcattctttttactttccgcggcattctcccaggcctctctttttgtagaaataaactcgcccagggcgcgggcggcattctccgccgtctccacgttcatcttctcataacaggcataagcctcaaaagtggccttagtcaccgtcagggcaagcgcgccgccctccgcgtccgtcgtctccaccgtcaccggatcctgcggcttgacgtcttcccaaagcgtgcggccttcctgttgcccggcggcttcttcgtccagaacttccgggaaattctttcggaaaaaggcgtcatactgggcgggggtcatctccatcagccgcaggcggtcttccagcctccggtaactctccgcgtccatcttcccgcgcagcggcttcccctgcggactcgtccgcggagccacggacgccgccacgcggcggatgcggcccagcgtccggtccttacggaaacggtcaatctgctccaccacgcgggccataaacttgctaatcagccggaacaccttctgctccccgtactcctccagaaactcggccccgtgctcctcaaacaaccggcgccacacctcctgttccacccccttgcgggccgccagggcggccctgttatccgcgtccggagcggaatccagctcgtaatcggcctgccgttcggcaatctccctccgggcctcctccaccacatcctccaactccggcctcttctccgcccaattaacaaaactcctgccgatgctcccctccataatctccggccacctcttcatcggaatcgcttccaacgcgctggctaccgcatcgcccggcgccatcttcccgctattcccgtaaagcagagcaaacacattcagccagattttgtaaggttccagcccgaacccgtaagaatcaggcaaataccgctccaccgtggaaatcagctcctgcgcctccgccagcagctcaaggccgcgctcccgatccccggtctcaaacaggcgcagcttactcacgggccgctgcgcggcggcccgcatcctgaacaccatctcatcgtaaagccaatccccgttcggagccaaaaccctgccggccatccgtccaaacctcccggccccgaacgtaatgccgccaagctccgtaatatcccccgtcagcggaatcgaaaacggcggagcgtccagcagccggaacccgttcaggccgctcatcaccacgccctcgctattcttctcaaacgacccggcaagccgcgcctcctgctccccgtgggaaaaaacatacacaaacgccggctgcagcgtcccggcctccagttcctgcctcatccgttccaggcgcggcagggcctccttcgcccaggcgtcgtcccggcccgccagctggctcatgctctcgcccagataagcaagcgcctgctcccggctcatgttcccggccccccgggcaaacccctcatacccctgaatcacatgctgcacctcgtgcagaatcgtatccagcaccatgccgggagccgcgttcttcccgccccgcgccacattcacggcaatataatgctcctgcggatcggtaaaccctcccgtgccgctcctgctgtcccggtaaaaatccacccgcagcttccgcagctccgggtaagcccggaacaactctgggaaatccagggccgcggccagggaaacattcacatgccccccctcgctcacgctgacgtgctccttcctcaaccgcaccccgcgggaatcaataatcgccttccgcttcccgtccgccggatccgtgtaggaaagtccgttattgtggtactccatgaaggattctgctttctcgccgataatagaaaacgtcgccgtcggatcctcataatccgcccacgctcccccggtggactcgtccgcaaacgccgtaatcttgatatcgttcccgtcaaaaatcacgtaattatacgtctgctcttcctccgctttcccgcgggtatagccgtctgcgtacctgatgcctttaatatcgctggacagcaaagacacgctggcggccttctgtgcctcctgtttcgtgccatcttctccatcccaaaaagcatcaaacaactcctgataaacgtctttgccgctcacgttttctccgcggtaatccgcccgtctttcggcacgttccaaagcataccgcacctcttccaccggggaatccttcaacaaggcaagaaccgtctcgtccacgtaatcccagcccatcaactcggaatcatccacattcaactctaccttgtaattggaaggcatgcccggcctgacctctatctcgtccagaagatcaatcagggaacggtaaacgccgtgcagctggaccatcttctccagcgtctggtggtacgtcctcccgtattccatggaatgttgaatgtcctcgcgcaactctttcttaatcgcttctatctttctctcatcccctctggcgtcagacaaatcgccgagaacagtccagatcatatcactcgcatcttccttcacctccggcagggcatccttcggcaacaacctgtcatccagggcttgatgcatcacctccatattggaagtctccacatcgccgaacttccatgtcgcattatcctgcgcgaaccagttcatataatcccggttcaccttcggattctgtgcaaaatacagcccccagccatacgcctgcgctccttctcctttacccatgaaatccgtagaaaacttccggaaactgtgaggggaagcatgcagggcggcaatggaaaacgtcacccccggttccgtaatcaccgcgttgcccgcctcaaaatggccgtcatggaacaagccctgttcctgtgctgtcctcacggaaaacgtcgcttctccctcaaaagaatcaaaaaaaccttgtgggtaagcatcttccatccctgaatccttatcaatcagatccttcaagcgttccttagtcttctggaaagactcttcctgcctctctttctcgcccatgcgggcgcgaacctccaccgcgcgagcctcaagctcaccctcattgatgagatacagggcctcactgctgtaatcccgataacgcgttatgctgtgcagtttttccaactcccgggaaagttgttgcctttcgcccctcttatatcgtttttccatttgctcaatggcctgaatcctctcttgaacatccttcaacatgaattttttcaggcaggacagggaggggggaattcccacggtttctggtgcgaaaatctgcggcgtcagacaactgccggaggcgataattcttcgctagcaattcaatagcctgctgcgccataatccctatatccataacttcctgaacctcatatttttctcccatcttcttaatagctgcgggacgtcgcatcaggcgggctatcctctcaagctcatctctcgcaaactccggcgtattgatccaacgaagcctgtcgccaagatagcctttttttattaaagcggaaaacatgcccgcacgcgcggatgaaggggaaattccattgataaaaccttccttatgctgaatccaatgctgaacttcatgcaacaagccgcttttcaaagaatcagcgcctttagttctattggtgaacaaatgaatggcgtttcgccacgggctgaaatatccgcccgcgtccttcaccgtcttatcctccagcacaactgtaatatctttcgcgtcaggataagcctcatacaattcagcaaaatcaagaagctcgccaagcttgacaggcttgtccttttggagaaccccacatcgaactcccgccttactggcgtcaatctccgcccgcaacttgccgtcatcccttccggcgaaagccttatcggcatactttccccaagtggccgcattcgggcctatcacggaaaacgaaacatccggattcttaaaattgaatctcttggaaagaggtataaccctctcttcataattaaaccggtagggaatcagggagaacttcttcttttcgctatcccattctccgagatcatgcccttcatactctccattctcgtctctcacctctacaagatcataagtaaccggatccagcagcttgcggttattctttgtgttgcgataggcataattcaccccgtcatcgtaaccccactcgcaaatatcatccccgttccaatacacatccttgatgtacaccctgtgtgaaataatcctgtattttccatccaggttggactctccgtgttcgcgggcatactccatggagggagttacccaatcgccgccccggaaatcaccttccttaatgtcacgggggacagccctgtacatggcaatcgccggtatcttgttgttcttccccttttccacaagagacctcctttgcttcatagcactcctcacggcgaacaaagcatccatgtgagcattatcccagcccagttcaagattccgggaggaatcaagaatcatttcttccggaatgattccgaacccatccgccatatccagcagactgacttccccattcttctgccgttcctgcggggtatcgccggacttgctcggcgcccctgtattcattttccagctatcatctacgacatacccttttgccctggcaaactcattcaccatgcgctgggctttctccatgtcgcctttctccacggcatccaaatactcccggtcaagttttttggtattgatagagaacgtaatatccggattcttcggatcaaacgtcccccggttgttcgtggaggacttgatctgggtggggttgaaggccagccaatcagtaccaatatcagctcccccaaactctctcacattgttgataatgacgccatcgaatccaagctttctcgcatctgccgcaatgccgtatgtatcgtaacttcttccgttgtacgagatattatcgtaataatttccttgagcatcaatgatttgaggattccgaaaaatccagaaatgccgcaatttctctactgccgtaatacttttgagattcagcgggttttccgtctcgattgcttgtatagaaatgaagagcacccattccatagtcgttggtcgttctcaatacgtttccctcgtagtccgtgtaatggtacaccgccagcggttccccgttctcgtccaccaccttggaggcattctccgggtcatgctcccaatcgccaaaccaattcttaaacgcctccgtgcgcacggaaagccactggtcttccgtcagattcgtatctttcccgttcggggccttcatgaacgtcccgtcagcgaccgccttcttcttgatggacgccttttccttctcgacaaacgaacgataggaagataaattacgggtagaaaccccgtccttgaagggtgtaggtaggcggccttcccggctagcagctcccctagtggcggggttttctatggtcaattccagcgtgtaaagaacgttaccttcctgttccttaacgtatctgattgctgtaacattaacatcaaacgctcctatcccttcaatatctactgtattgaaaaaatgataggctccggcttttgaggcatcttgtttatacgcctcttcaaaaaatccatcctccgcattctcaaacaactcatgaatgcgggccgcagccgtataatgaaccctccgggcctcctccgcggaaaacccaagcgccttcaaattcgccacggacatctgggccgccccggccttgcccaccgtcttgccggaaacgcgcgcctcaatcacggcctggatccccgtattcttattaacgaacaccttgccctgcaacggcttcaacctcgcccgcatctcggcggcggtagtgatcacctccccggaaggaatggacaccagggaaaaattcgctgtgggagcctcatcttccgcaggggcggcccccctcgtcagcgccgcgtccagcatccggcccacatcctccgcaaacatacgcagatcatgcccggcagtaatcgtatgaccttttcagcaataagctcaaaagcacgcacgctattctcaaggtgagagaccaaatcacgcgacggcctggtctgccccttctctttttcaagttgcgtcctggccgccgtaatacgttcagccagccatccgcctctttcattcgccgccatctttccaagccggataagagtacccacaatcaattcagacaaatgcgcagaactttccacccccatttgcttcatgatcacgctggacaactcttccacccgttcacctgtcagctcgccaagactccattgattctcaccaaacaaatcacccgtagaagaatcttccgaaacctccaacggcagaaccccgttctcccgatccacctcctcccgcgtcttcatccccagctccaccatcacggcgtcattggcctccttaatcaaatcctcatgcaggccaaagttctgccatcgggccctctgcgccttcaaatccttcaccacggcctccagcgcggcggcgtccttcacatccacgccatactttttagccgtctccgggcgtctgctcgccccgctgatggaagaaatctccttcgtcagctcgctcacgcgggcggcggcgtactgcgccagccttgcgaaatactcctccgcgtgggaattgccgaacaaatccgtctcaaacgtcatcccggccgcctccgccagcccgcggatgcggtccatattcgcggccacctgcatcacggcaaaagcctgttgccagctcttcccctccatcagggcccgcagtccggcccgctgcacctcggtctgattgcggaacgccatcgccacgcgccaggcgtcatccggggaaaccagctcattgcccagcgcgtccagcaaatcggaacagccgtacatgcccagttccaccccgcgccgggactgccccttgcggaaaatccccctctccacagcctcctccttcgtcaaccctttctggctcacgtaccgggcaatctcaaacagggaagcctgcccgtcccggatattattctccacgtcgtgcgtctgcgcccaatccagatcaaacccggccgcctcatcatacaccgtgcaattaatatcctcatccgtgcaggcgttaaaacggtgccgtccgctgatcacctgtaaagaaccatcctcccgccgccacacggaaatcggcgcggcgttgcgctgccacgcccccacaatcggattcaccaccccggtctgctcatccgcgccctgcttaaactggggcacatccgggcaaagcgtcaacctatccttatcaataaacccaaggcgcaccccctcctgaacctcaataaacgccccgttaaacacccctgacccatccggctcgcccagcgcctccacgcgggcctgctcccgctcgcgccgcgcctcctgcgcctccggggaattcctccggcgcccgcgcctcatcctcggcctccttccggcgctcctcatcctccttcctgctctccgccagctcatcctccagcgtccgggcctccgtcgccacgcccgcgccaaacatcgcgtccagctccgcctgcgctctggcccgctccatggacaactccatcaaatccccctgctgatcccggtacagggcattccccgcatccagcatcaccgccagcgcctgcctaaccggcagggtaaacacgccctgttcctccgcctggcgcaccatctcgcccagctccacgcgcgccttgaaagcccccaggaacttcaccaggtgattcagcagcttccgcagccaggagggaagggaaggatgattcaccgcgtccgccagccagcgggaacgcccgatcttggaaaacgcctcaatcgcgtcatgacccgtcaccggcttcccggcgtccaggtgaataaactgcatctcctccccccgcgcctccgggaacaactcattcatcaccttctgcgcctcctggagcatcgcgccgagctcgccccaggtcaaaccctgctccgccagccaggagatgacagcctgttccatcgtctcctccatcaaatcctccaccgtcgcaaacccgcgggcatacctcaacacacggcggaacgtatctccccggcggaccttcgtcacataagcgttggaaaacggggcatccatggccggaaccctgaactccgggttccgggcctgttccgtcctgatgcgttcctgggcttcctcccatgtcttcacaagggttcccagcggaagatgctcgctcaacgaagcatccatgcgggcggcggcctcctcataactcaccccctccgcctccagggcgcggatagcggccatcgccatatccgcgcgggccttcatctgccccagcgtctccggggcaatcaccatccgttcggccccggtcttctcatccgtcaccgtgcgcgtaatcacctccgccgcgtcaaaacgcccctgggccagggcctgtctcaccgtcacgtccccggccagcaaatgctgcgtgtagaggatatcactctccacctgctcgctcacaaacgcctgtaaataagccgtcatctgctcgccgtccatcagcgtgtaagaaggggcgccctcttcctgcctctctctggagacggaagcatcctcccgcggcgctttcgcgctgcgcgctggagcatacacccggaacatcccctcctgttccgccggctccacccgcggcaccatgccggcatcctcggcagcccgccacgcgtccagctcccgcaaagactcaatgcgctccccggaaaggcgttctccggcagccgcgctcgcccgctccatggaagcctgcggatcctccatccaggcatcgtgcaaattggcaagggccttattcaaaaaaccttcggcggtcttttcctccctggcctccagatacccctgggccgtgcctcccaacgcttcataattcttcagggaaagcctgaactccctggcggcccggctcaactgggaataattcaatccggacaatccaaaactgaacgccagcagggcaagcccctgttccccggaagtcatctgggaaagctcactggcgtattgatcccatgtctgcttgccgcgctcatcatccagcatgggattgatggccgatctcattaaatagccggccgtgggttccaaaatgccttcttccaccgtcccggccaccccttgcagcgcatactgggccgccggactgccggaaacctgcgccctcactccggcccccttcttggttcggagcagctttcggactcccttgtaaagaggcgttgccctgaacaacccgtgaaacccgatcatttcctccgccgcgtccgccgccccgaaccagaaagcgcgcttctcaatctcgtccacgtccagccccagcatgtacccttcttcacgccgcctttgcatggacgtattcaggccaatgagcggcccggcgtaaggaagaaaccagggcgccgtgtcccccgtcatgctgcccaggtggtagcccaccttgcttaaagaggaagcctcgtcgctggaaaagtaatcatcttcccctccctcaagagcggtagtcagggcggaaaaaatcctgctgcgcttttgctgcaattcgcggcgctcctgctcctggaatcctgccaactcaaaagcttccgcgtcggacagtcccatctgccgggccttggcaacggatacctgtaaagccgccgctttcattcgggcatcctcatgggaacgcatattctgcaacgccctttccagggaacgcttcgttttcactcccgccaccttgccggtcatgaggccgccagcggtcattttagcattcagaattgactgaccagccacggccatcaccaatggattggaattctccatcacctcctggtacgcctcatccgccctctttttccgcgccgcccatgcccagccggtcatgggccgtgctcctggatctgtttctcaacaaattgcaaagcatcatcaaggcatcgtcatcattcccgatgatgccaaacaaatcatcggcaatgtcatcatgatacagcctggaatcctgctcaaacgcttccatgaggcgtactccgcgcctggccttctccatgctcgccacactcaccccggcatgaaacaacgccattcgctcatcggcggaaagagaatcctgctctccgctcacgtagcggctcaccactccattaagatcgctgatcctgcgttcacgctccacgcgctggcggtcttccctctccacaatatccttgccgcgttccgcaaaatccttccacacctgttccggggagacaatgcccttgccccacaaatcatgagtattcttgtaaatctgaaatccaacatcactatctccatcccccaggacttccgccaaacgcatgcccaacatgtaggaacgctcttcctcattagctgattcaaggcgggaaacagcatcttcgccccaacgttcagcaatacgcttcaacgcttcctgatcgtttctgcctgcgcgcagcaggttcatgaccatgttctgccggtcgcgcgcctgttctcgtttccgttcctccgcccccttcatcaacatgatcccctggcggcgcacggaatccatatcccccaactggggattgaaggattcggaaccttcttcctccgccgcttcggcatccagggaaaccccggcttcaagaccggcgcgttcttccagcccattcaatccgccgtcgtcaagcatctggacatcctgccgccattcgtcaaccagcttgggagaatccgccttcgcctgttcctgcgccggcgtcatctccggcaggtgaaatccggcggcagcctcgccctccggcagcggcagggaggaaaaagaaagatccagaggcatatccgcagcgtcggctccgtcaaaggaaaaattgtcgttcatggtgaaaaatatttataatatgttcaatgttaaaatgatttgtaatacttgctcacgccgttgacccaatgcttattcaatccgcgcggatcattcccggctcctgccggagcgtacttcccgccaatggcggcaatcgtcgtcaacccctgatccagataatgcttcctcaacaggcgggcggcgtaattaatgctctcttccacggaggaaaaagcgcgcgggccgcctccattcgggctgattcccatggcgttattcttgcgcaggaaagcggcgctcgttcccttgccggtctcgtgcatggcaatagccatcaacagcttcggatccacgccatacttccttcccgcatcataaaaagcctggctgtactgtcccagcccccccagcttggcggcaggcaccctggactctccggcattctgcttccaatcctggcttcccggatattctctcttgaaaaactccctcatttccgggctggcaggggaaatcgtcacattcgtatccatcttggaagaaaacgtcatccgcagcttgctggcgccggacagggtaagctggggggaactccccttggtgtagcccaccacgggcaggggcttcccgcggcgggaagaagaggaagaaggaaccagggcggccagtccggaaacgtcgtcgccaaaccgctgcctcatgctctccggaagaagaatgccggcgggcgcgttcgtattcacggtatctacggaaaccatggcagggaacgtaaccggcttgcgcaacatatccttccggcgcagcgtctgcttatctccttcactcaataatttggggccagcattaagccgttcgtcgtcctccatcttccatgttgtagagactctttgtctttcttcatccaatgtatgcccgtatttaaccgtcatcaaatcgggccgacctgttacatttctcaagatcgcttcaagcatatcctcctgaatagcagaggaaggatccttatcattatgactgctcttatacccttcgaaccacgcctcaaacctttcgcgcacaaccttttcggtattggcagcaagatttttctcaagagaagccagacgctccttcttgtcttttttcatccattcatccttgctttcggcattttgaccggaagctatagcactttgcttgtataaagcataagccgcttcggattccttgtgcatcattcccactgaattattataatcactctgcctgtacagcttcatgccgctcatgttctggaaacgatcactcactttaagcatcggaacatctgattttctccccgcccacttatccatgcggttcaaaacgtctttctggaactcggctgacttcccgtaacgcttgcacagaaggatcacattttccttcttgcccgccaaatcgggcccttcttctccagccctcaccatatccgcaacccggtaaatgaaagaatcaatctgcggagcgcaggcgctgtaatccccgtcgcgctcataaaccgcatgaaaccccaattcttcctgatagacgggaccggacagcaaagcattcgtcacggcctgcctgtcgttctttgacttaggacggaaagccgtctgctcgactatctccgtaagcctgttgtcgtcctggcgccgcaaaaaacgcatcatctcatcctgttcggcggcggaaaaatacccgtccagctccccgcggttaatcatctcggcggcaagatccgggttagtcgcggccaggttctcaaaatgatggagggaagccttcttcctccctctcaataaacgcagctcaccttcgtcacgggaaatcgtgccggaagctacggcgtcatcaacagacctctcgtaaccgccccaatcctgcttctcctcggccagcttcaaactcgtatcgaaagcctgtctggcaacgcccagctgatgtttggcagccagcccccaataacgttccggcaggcttgacctcacggaagccctgacagcctccgccttcatggcgctctccgggtggaaaaaactgcctcccagcgcgtcaatcttctggccgaactcgtaagccaaatctttcagcttcccctgccggatggaaccgtccttttcaaaaacgctctccttcgtgcccggcgcgaaagccagcatcctggaaaacttcgcgtcggactcgtcccggatgcgtcgcagctccacctcctgccgctgcatctccccgaaatcggaaatcctggcaaacgcctccgcgctcccctgaaccgcctcttcggccttctggacggacgcgcccagcacctgaccctgatcgccattggcggcccgcgccgcgacgccgggatcagccttggccgtctgcagggacggcccgccgtataaagaaaactcgctcatcgtgatataaaaccggtaagttgatcaatggaaaaaacatgcaccttcggcccgcgcaaaaaccgctgccaggccacatgcgtaaaacctctgcgggaaaactgccgggccagccgggccagctcacgcggctccccggccgcccaccacacaaacaagcacctctccggaagatccggcatgcccacaggaggaaaacacaactcactcagcctctcggagggcagagccaggcacacctcctccggggaaacgaatgccagccccaaggacgcgcaatccttcacatccgtccacaaatcccggcccacctccgcataagcgctcacggtcgcatcaaacgcattcatcgccacacgctcctgtaaggattccacttctggccgcccaggtaatcgtaaaaagaaaacccgctcttctccggactcgccgcccaggcccccagcgtcatcatcccctggcggggatccgccgtagacccgggaaacacgctcccggccaaaccgcctaaattataaccggcaaaagccccctgggcggccgtcgtcgaaccgaaagcccccattccggcgccaatgccgcctatcaaggctccgccaagttgaagccccgtggacaccagggccccggaagcggcggacttataagccgccgcctgattctgcgcgctcaccagcgcggaatccccctcccagcgctgcatcgccgcctcatggcgcttgctctggtcgctgatcgccgcgcccagggccaaatcggaaatctgcttctccagcacttcggccgcggcaagctccgcctggctgccggacccctcggaagtaaacccggaagcgcccctcccagcccgcacggaagccgtggcggccgtctgattgcgcctggctgtcgccatattctcggcggcaagacgcaaagcggaagcggactccgcctcggtattggccgcattcacatacgcggcatcccgcgccgcccgtccctgtgccagagcgctcttcgcgttggccctgttcgtcacataagaaccgatactgcccataaccctacaaaatggaacgatccaaaatatccttcagcggatgctggtcattgctcccgcgctggctcacatcgtgatacagggcgtcggcaacataccccctgtacaactccaaaaacacgcccacattctgcggcttgcccgtcaccgtggccgccaccttggaagccagcaaacacttcacggcttccacaaacaaaggctcatgatccggcagcatctccgccaaagccgcctcattggacaaaaaccgcacctgcagcagggaaggagcttcctcgcaaatcaccacgcggccggccatgcgccagcgcctggcctccaccttcaacaacttcaggcaatcctccggcagcggaaaccggccgttcctctccgggcacgccagcacggcctccttcgtggcaaacgaccacgggccataggaaacggcctccagcatcacggaaggaaaccacaactcgcaagccctggccgccggggaatccatcacaaactcctgatcccccagcagggaaaggcactgtgaaaaaaacgtcagcttatccattccccaacaatcgcatgagggcggacttccttcaagttggcgagaatcactacttttcgccgggaaaataataatcaatgaatattttaatgattgcgaaaataatcattttaggaattggctcaaaacaggcttcaagcaccaattcaagggctgcttcgagtatgatgaataataacttatactttaatcttttagtatatttcatatcattctttacacttggcaaatgtgaggaatgatattttttgaaaaaattctaataaagcatcccctccagagcatcggggcgtctgtgaggcctcttcaccttctccggctccccggcatgaccggacaccaggccgcggctcaccgcttcggcaaacgtccgggccgcatccgcgccatgggaacaggcgtcatgaagcggcatctcccgcacgcacccgttggaccccggcggcaaactgcggtaatactccagggaacccaccccggaaacatacttctgcccgtcaatctccgggcgccggttgcagcgctcatgaaacacgcaaaaacgcagcatattccgcagcgcgttaatcccgattcagacatcggacgtgcgcggcacgatcgccgtgcggaacccggcccgctgcagcacggactcaaaagaagtcttggaaaaatccctcctggccgcatcgtgcggcagcaggtgcagggcgacaggcccgaactccctctccctcatccggatctgccccacgtaataatcaaccgcctgattattcccggcaatataatccagcgcgtaatacctgccgcccaccacctgccaaagccaaatcgccataaaatcgctcaaccccaaatcccaggaagcataaatcggagccacgtcatccacttcaaactcggctgcgatcctcccctcggcccgcagggcagaaatccacctcccgtaaatagccccctccacggacgtctgcaaagcctcctccggcacggtgggaaactcctgcttcacctccgccccgttaatcctgtactgggtagcgtaccacgccttctgcccctcggacaactcaatcccgtaacgcctcttcaaatcggaaaaataatcccgcaaaaaatcatccagcctcggctccaccccctccaggcaatactcccgatgctgaatccaggaaaaaaagaaaaacctgaaatccaggctggaaagaggcttgcccaccatctccatagcctgctccatcaactggtaagccagcccggccttccctccctcgtgggtggactccatcaccaccacgcagctcttgccaacggtattcaacgcgcccgtgcggatcttcctggccctggccggatcatgcagcgccgtataggaaaactcggaaatatgcaaaaactggagagtggacccgcgcaaattaacccctacatcaacagacccgttcgtgcaccaggccatgcgggtggccctcttctccaccacagcgcacccctccttaaccatcctccccaaagcagccagcgcccattcctccatcgtcggattctccggcaaaaaatccaaatgctcataagcaaaagcaatcttgcgcagcttggcctccccgtcctccagcgtcttatcaataatcccgcaatgctgattcctcccaaacaggcaaagatccagcatataaatggcgcaaaacgtagaaatccccagctggcgaaccttcaaaatcgtattgcggaaccaaagcccgtggaaaagctcctcctgggcccaattcgggcggaagcgcaccatccgcccctccttatcctcaatccaatacaaatgattaaggcgccaccacctgtcggccagcagctccttccaatccggtctcgtcttcgcaggctccgtcattgcgtatcaacagctaaaaactcaagggggcggtcaccggaaacccggatgccaaaccgcacgtcccgcttccacatggcggacggaagcacctcatgccatccccgttccatcgtcctggtcttgctcaaccggtcccaggcgctcccgtcattggacacctcaataccggccggggccgtatcggaagcaaaaaacacacgcacagccgccgcctgtctatccctgcccagggactccgtcacatccagcgcattcgtcaccaccgtggaagtaaaatcccatgcgccggcatccacaaacgggccgtccggatcaaacacctccacaaaccgcccatcctcacgctctacggacacaaacagcaaatcatccccggatccattgggcagcaccacggcattggacatccgcccctccgtcctgtgacggtgccaggcgtgaacctggtgcatgctgttataagtcatcaacgccatcgtgccgtccgccagggtcatcaccgcccgcgggtggggcttcctcataaaatccccggaagtaacccctccgccgccggccagcacatgatcggcaaacaccgtcaaatcgcgggacacaaacccgtcgctctcgtaatcatacccgtactgatacacccgtccgccgcccctctccacatacagcaccttatcggtcgccatcagggccggcacatcggaagaacccacaaacccgtgattatccgcccgcgcattggcgtaagtcatcaccccctggccaccggacaccgcccactccgcgtccgccgttcccagcagcagccgggaactctgtgccatcagccagcaaatcctgtgctgcgttgtggtgctcaacgtcaaagccagcgcggaatcatcctgcttccccacctcgaaactgttgaggtcatccgtcttgctcaaccacaccgtctgcggctgggcctgcgtagcagccagcaccaggcgctgctgaaacacatccaccagggaaggaaacccgtacaccccccggaacgccgcgaaactccacatcaacgactccccggacggaggaaccccctccggaaccgcggaaacattatcccaaagagaatactccgcggaagccgtcacctcggccgcctccgcctccatccacgccgtgcaggccggcacctccacccgcacccgggaacgcaacttcacattactctccgtccatgcctgtacgctaatcaaaaacaaaccatcctccggcaccgtgtaagacgcctcctccatcgcgctgaacacctccgcatacctgccgccggacatccccttgatcgtggaaggcagcacaatctccatccccgactggacagacctccatccctgcagcgtcaccaccgtacccgccgttaaaaaacggctcatgaaaatgctggccgcattcccgttcccgctcttattgacggactccgccgtctgtgtccactccaggcgcaccatgctcccggcgcccacatcatccgtcgtcagccccctgggcctcaccgtcagcgtccgcccctctctggacaacggacactccccggaaaaacgctccccgtcaaccaccagggcattcactgcgggcaacccggcatacacgcaataatcatacgcatcgccctccaaaggcagcgtcaacttcaacacgtcgctggtggacaaccccgccgcggacatctcctcccggacttccggcttcaccaccccggaagccaccccggaaaactccgcctgacactcggcagcctccagcgtactgcccttatcatggacaaccttaaccgtataaaacccgctggccggcgcggtatacacatccgcactgctcttccaaaccgtcgtaaactgcgcatccccggcggaccaggccgtcaaccgaaccaccgcgccctcacccattccggtcagggcgttccccgtcacattcacgtcaaacctcgccccggcaggccaaaaatccgtcctcatcccgcgggcgtccagcgtcaccgccccggacctgcgcggctccgtccaggcaaaccggaccgtctgcccgtcctccagcgcatccgcgggcagccccctgggcgtcacgtcaacaccgtcgggccccagcgtcagcacggcggacgcccccgtaacctccacctcatccacccacacgcggcttgcccggatggaagacgccgtacaggtcaggaaatgccgcaacgccggcgtggcgggaaccgaaaaccgctgtatggaagcaggccgggagccggaacgcagccgcagcaccacatccttcttataagcatccaccaccagcttattcccgcagctgtccggaggaaacccctggctgggatcggaaccgctggaaagccgggactcatacaacatcaggcgcaggtagcactcctcttcgctctcgtccccggtaatctgcaaattggaagccgagccaaccatggaagtagacgtccccagcagctgccaatcctcatcgggaaaacgccgctccacggcatacgtgccataccactccttactgcaccaaaacttccaggtccccttgcaggtaatcgtattggaatggcaaatcacgcccttatgaaaatgctccggataatccgccggagacgtcaggccgtccacaaaatccgccgccccgttaaaatccctgtcgcacgtccaccaggaccaataactcccctcattgaggcagagctttttcccagccgtgaaagcgctggccgccgtaaacgccccggcaaccacccagccctggcgaatcacggcccccgtgctgaacccggtctgctggggcaccgtcacctggacgcgcatcacatccccctcattcaccgccgcgtccgcatcggacgcatgctccccgaaagacaccctgtaacacccctcatccagcgtcaggcgcaccggaaaatcccggaactcctcataccgccaggggcgggccttaaactcatagggcgccagggaaaacatgccctcgtcatcccgtttcagcaccatcagctcatgcgtggggcaggccagaaacaacatgctgttcacctgcttgtggcgcagggcggcaacgtcagccgccgtccacacggaaggcagggaggcaaccacatccccctcaacggacaacacgcgcagcagagaaggagccacctccacaagaaaacggtcattggtggaataaacatagggaagaagaagggaaccctccaaagcggcggccaccctcctcatcccgtgccgccgggaaactccccccgtttgggaaacatccacattctccagcacggacgccccgcgatgataaacatccagatccggacgcgcggcaatcccgggcgaaagctcgcctccattaaaggaaatcctcttcatttcccctgaacataacccaggacgttcaaccggggcaagttggcgaaaatcaacgtttcttctccggaacagcaaaaagggccgcctccatgcagagacggccctatggacaaaccgacgggaaaaaaactactgaataccgtaagcaatagcaaaaacaagcttcttgccggcggtcaccgccggtgttccgcccaccttcgcgtaaaccatcgtcacagcatccaccggccccgtggaaaccgcctgggaacccttcgtcaactgataagtcccggcggcggtcacggtcagggaggcggaaaaagcatccgcctcctccttcgttcccacggtcagctgcagcgtccccacgccttcggaaacgacatgggaaagctgcggcagcacgcgggctccacagggaacattgcaaatggcgatcaggtcatcggccgccagggacgcgggcatgatgaactccgccgtagccacatgcaccccggcgccggtatggatggccgccagctgcggcaccgtcggcaggccggtccgatccgcaagggcaagctgtttctctgcaataactgtttgatacgttgccataatcaataaaataaaatgtgttgttatcctaattaagaaagctgcttgcacttaatctgcacaaacgcctcttcgcgcatgcgggtggctcccataatcgtcttaaggccgatctggatcgtgtcctccttatcggagcgcttctccaccgtcaccttattctgcttccaggaaccgaaatacagggaattcttcatccacatcgggcaaatgatatccccgtcctcgtcaagcggcaaattgggagcaatgataaactgaatccccataatcggatccagggcgccgttgctcttgcgcagggaggaaaaaccgaaatccgccttctgcagacgctcgtcattaatcagggcctcgcgcatgcggggagtaatcgcgcagcacacctggtcgccgtaggcattggaagcatcatccagaatcccgttctcctgcagcagcgtaataccacggttcagcttctcaatcgtcagcgggcaatccttagccgtgccgccggtataatcgactgccaccacattagcctccagcaattccagctgttccatgccgtcattgccggcaaacgccgtcccgaaaatgccgcccttggacggcacatatacccctccctgcttcttcaggccgaacaaaacatcgtccatcttgcgggcggccgcgtacttcagcgcgttaatcgtctgcgtcacgggagcgtccaggccgtgcaggaaaatatcgtcatcctcatcatagcccaaatgcttcgaaaaactaaccggcaacatccggcgcttgaaataatcaagctcgtccaacacaatatcctgcatccggccctgcttctcattcagctccgtagtaccgacaaaactgaactcctgaagcttgcccgtcaaaccggacttgatcacgcagaaacgttccaggcgggacgtagcctgctgaacctgctcctgccactggttatcgtaagtctcctgataaagatcggagatgggtaaagtgtaattacttggcatgcttccatcaggggacagaaaccgcacatttgcaagttgccgagtgtcaattcagttgcagaatctccaattcggcatcttgtctctgtcatacagacgttacagaagtgttacaaattgaagcaaattatttatagaaataaacttaacacccactctctccgccaaacttcttttatgccgggcgcaagccatgcctgttttcacggaacagaaaaaggcaggcgaatacgacggccgccccggcattcccggaacggccctgagtgccttattgatccttcctcctgcctaagactccccattcagttcccggcggatgtattccgcagtgggggattttttcccggctatctgctccggcgtgccttccgccacgatggttcctccggcatcgccgggtccggggcccatgtcgatgacgtagtccgcctccgccatgatttccgtgttatgttcaatgacaacgacggtgttcccctgatccgccagacggtgcagcacgtcaatgagcagccgcacatcccgcggatgcaggccgatggagggttcttcaatcaggtacaggtctccgggcagttccctgcctttcatcagggcgttccggctgacgcgccggcccttgatgagttccgtcaccagcttgagccgctgggcttccccgccggaaagcgtgttggaggcctgccccagcgtcagataacccaggccggtttccgacagcagtttgagggggttcgaaatgcggggctggctttcaaaaaatcccgccgcttccgcaaagtccatctggagcacgtccgcaatggtcttccccttgtacctcacggtcagggtggcggcgttgtagcgcttgccccggcaggtctcgcacggcacatagcaggggggcaggaagtccatttccagcttttgcatgcccgtgcccttgcaggattcacagttgccctgccccgtgttgaaggagaaacggccgcggtcaaagcccagcctgcgggcatccgccgtctgcgcgaacagggtccggatgtcgtccaggaaacccacgtaggtggccggggtggaacggggcgttttgccgatggggctctggtgcacgccgtacaccatgcggatggagtcaaagccggaagaggttttccataattttctctgctccctcgtgagcttgtcgccgatggcctggcgcgcagccagacggatggttcccgtcatcagggaagttttccccgctccggatacgccggtgagcaccgtcagcctccccttgggaatggcaacgttcacccccttcaggttatgcaggcagcagccctccacgcgcagccacgcggattcatccttttgggacggaatcctgcgccttttcccgcggtagggatgcctgggcttatggtgcagggccgcgcccgtgacggagtccggcatggcggccagttcctcaaaggagccctgggccatgattctgccgccatgaatgccggctcccggccccatgtccacaatatggtccgcgcgcctcatggtatcttcatcatgttccaccaccagcagggtgttgccccggcgtttgagttcatccagcgtgcccagcagcaattcgttgtcccgcggatgcaggccgatggtcggttcatccagcacgtacagcacgccgcggaggtgggaacccagctgggaagccagacggatgcgctgggtctccccgccggagagcgtcgtggcgctccggtccagggaaaggtagcccagccccacccgctggaggaagttgaggcgctgcgtgatttccgccactatgtcacgggcaatgagcgcttcctcccgttcaaattgccaccctttgaccagttctgcggcggccacggcaggcagggaggcaatgtcaccgggagtcactccctgaagccgcacggcgcgagcaaattcattcaaccgcacgccccggcaggcagggcaggttgttattcccttgtcatcgtccgcctgccgcgccagttccctgtcatatttcagttcagcctccagcagggattgcgcctggtcttcctttactttccccctgccgacgattccatgcccgcggcatacggggcaccacccgcgcggagagttgaaggaaaacgtgtacggttccagttccgggaaagattgcccgcaggaggcgcatgccagcctggtgcccatcagttccggacggacggaaccgggcgggagcacctgcaggaacccttcccccatctccagcgcggcatgaaccgccccggcaagcttttccggcggccaggaggcctccggccgtgcaacgaccaggtccaggtcatggctggaatagcggtccagcggctgaaatccgctcaggggaaccagtttgccgtccacccacatttcctcatatccctttccttccgcccagcgggccaggtcggcgtaatgccccttgcgtcccctgacgaggggggccagcaacgcgagtccgccatgttttttcagctccctcgccaccagctccaccacttccgattccgaccttttgcccaccggaacaccgcactgcgggcagtaggcctgccccagcttggcatacagcagacgcatgaattgccagatttccgtgacggttcccacggtggatttggtgcccccacgggacatgttctgttcaatagccaccgtggggggcaatccggtcaggcggtcgatgtccggactttccagctgttccgtgaattgccgggcgtacggggacatgacgtccatgaaacgccgctgcccttccgcgaaaaagatatcaaaagccaaggagctcttcccggagccggaaagcccggtcagcacggtcatttctccgcgcggcacgtccaggtccacgtttttcaggttgtggtggcgcgctccccgcagggccatcacgccttccggtatatccatgtctgcggattccgggacggcggcgtccgcagggtcgtaaacggaagggttgccttccagcacctccctgaggtatttgcccgtgtatcccttcccggcggctacgatttcctccggcgtgcccgtggccaccacatggccgcctccggcgccgccctccggccccaggtcaatcacgtagtccgcggatttgatgaactccgggttgtgttcgatgaccagcagggtatgcccctgctccaccagttcccgaaacacggccagcagaacttcaatgtctgcaaagtgaagccccgttcccggctcgtccagaatcagcatcttggagctgttcgcgccggaacctatctggtccagcaggattttagccagcttcaggcgctggttttccccgccggaaagggtattcagaggctgccccagggtcaggtgccccagccctacgcgctgaagcacgcccagtttggaagcgatgcgggaggctttggcccctttttccgcgctgaagcattccagcgcagccgctaccgtcatgccgagcacgtccgcaatattcctgccgtcacggtacacgctcagcacttcgctcccgtaccgggagccgtggcaaagcggacactgaacgaaaatgtcggaaagaaactgcatttccactttctcactccccatgcccatgcagcgcggacaccggccgtccccactgttgaaagagaaaaaaccgggcttcatgccgcgcgcgcgggccgtctccgtttccgcgaagagggagcgtatttcttcaaaaactccggcatacacggcaggggtggagcgcggggtgcggacgatggggctttggtccaccatcaccacctcatccagatattcccagcccttgatagacttgacgcgggcgggttcctcctcgcatacggctcctttctccaccagcgcgttcaggtaaagaacatcgtgggccagggtgcttttcccggacccgctgacgcctgtcaagcaagtgaagacgcccaggggcactttcacgtccagtttgcgcaggttatggcgcgtggctccggatacggtcagaaactggcgcggctttcgcctctttttgggcaccgcgatgcgccgcctgccggaaagaaaagcccccgtcagggattcctcaatttctccaatccgggcaggcatcccggaataaaccagccttcccccttcccgtccggaaccgggccccatatccaccaggcagtccgcggcacgcatgaccgcttcctcatgctccaccaccaccagggtgttcccgcgctttttaagccggttcatggcggaaatcaaacgggacgtatcgcggggatggagcccaacggtaggttcatccagcacaaacagcgtatccgtcagggaagcgcccaggcaggtcgtcaggctcacgcgttcaatttcccctccggacagggaccgcgtggagcggtcggacgtcaggtagcccaatcccacttcattcagatattccaggcggctcctgagttccgccacggcatgtttcaagccggggtcttcatccgcccgcggcgtcacgtacctatccacccaggccagcagttcatccatgggcatactggaaagttccggcatgcttttgccgcccaccttgaattgaagggcttccggcctcaggcgcaaaccgtggcaggaggggcattcctgatatgtgcggaaacggctcaggtacacccgcacgtgcatcttatgcgtgcggctttccagatatttgaaaaatcccgcaatgccgtaccacagcccctgttcatacatttcatccgggtcatcgccgtcgccgtacagcagccagtcccgctcccattgcttcaaatccttccacggcacatccagacggactttacgggcgtttttgcgccagccgcgcatcaggtcccgcttgcattcggaaaatacttttccgtccccctcaaaaatatggatggccccgtcctgaacgctgagttccggcttgatgcaccggttgtagtcaatcgtgatgacgcgcccgtagccgcggcattccgggcacgcccccagcggggaattaaaagaaaacaggcccggccgcggttccatcagcggatgccagtctccgcggaatttcaaagcggacaaccagacgccgtccacacggggaatcacatgggccacgccgccgcccaggcgcatggccgtctccagagcctccagcctgcgttccctctggtcttccgacagcctcacgcggtcctgaaccaccagcagcggttctccttcctccagcgtccaatcctcatcctccagccggaggatctctccatgcgcaaaagcgcgcaaatacccctgtgccaccagattccttttcaacgagggaagatccacggattcgggccgcgccacctccaggcaaaccatcacttccgttccggcagggaattccgcatgcagcttttcatcaatggtacctggcgtttccggcttgatttcccgccctgtttccgggtcaatgcccacggccagacgggcgaaaacaaacttccagtaatcattcagccccgtcatggtccccaccgtggagcgggatgtcctgacggagttgcgctgatgcagggcgatggccggaagaatattctctacggcgtccacatccggcttgtccatgcggtccatgaactggcgcacgtacggggaaaaggtttccatataacgccgctggccttccgcatacagcgtgtgcatggccagacttgttttccccgatccggaaggtcccgtcaccaccgtcagccgccccaggggaatgtccacatccacattctgcaaattatgctcacgggcgccgcggatgcggatgcgcccatcctcacaatgactcatggagaaagaatatcatcaatttggaatcattccaagagaagcgcctgtcatgaatccgggtttccagaggagtccggccaggtccaaccttcctattacgtcatcatcagcacaaatggagggccgtgcttgcatttctcccggcagccgctagtatttttcgattcttagaccgctgaaagcgactctacctcgtcaattttcaacaagacaaagatgattaagtggattctaaccaagattgtcggcaccaaaaaccagcgtgaagtgcgccgtctgcgccccattgtggaacaaatcgtctccattgaagaatcatggaacggcaagggacaggaattcctgcttgagaaaacgagggaatggcaggggtacctccatcgcttcctccccatggatctgccccccgtgcgcattgtggaagccgcgcccagggaagagctggaggaaatagccgccaaactgaatgcccgttttgaatccctgaaaagcgaattcgcttccctccccgcggtggaagccactcccgcctccattgaagaagggaaagccgcctggaacaacattacgccccagtttgacaagctgcgcgaacgctacctgaaccagatactgccggaggccttcgccgccgtcaaacacggcgcccgcctgctctgcggggaagaacgcgatatctgcggtcaaaaacaggtttgggacatggtccactttgacgtgcagctgctgggcggcattgccctgcaccgcggctacattgcggaaatggccacgggggaagggaaaacgcttgtcgccaccctccccgtttacctgaatgccctgaccggcatgggtgtgcatgtagtgaccgtgaacgattacctggcgcgccgcgactcggaatggatgggcatgctcttccagttcctggggctgactgtcggctgcatccagagcatgatgccctcccagctccgccgggagcaatacgcctgcgacatcacttacggcaccaacgccgaattcggcttcgactacctgcgcgacaacggtatggcaacctccaagtccgaacaggtgcagcgcgggcactacttctccattgtggacgaagtggactccatccttattgacgaagcccgcacccccctcatcatttccggccctgcggtcgtcacccgggaacagcagtacgataccctgcgccccgccattgagcgcgtggtgaaggcccagacgaacctttgcaacgaactgatggcccaggccctgaaagcccaggaagaaggccgcacggaagaagtgggccgctgcctgttcaaggtaaaaatgggccagccccgccaccgcgccttcctgcgcgccatgcaggatcccgagctgcgccgcatcgtggaaaaatatgaactgaccctttaccaggatacccgcaagaaggaactctacaagctgaaggaggaaatgttcttcaccgtggatgaaaaaacccacgacgccgacctgatggaaaaaggccgggaagttatctcccccggccatccggaagatttcgtgctgccggatttgggaaccgcctttgcggaaatggacgaagatccgcgcctgacggaaaaagacaaactgcgccgcaaaaatgaactgaccaaacagcttgacgaaacgggagcgcgcctgcacaccacctcccagctgctgaaggcctactgcatttacgaaaaagacgtggaatacgtcgtcaaggaaggcaaggtcatcatcatcgaccagaatacgggccgtgaaatgccgggacgccgctggagcgacggtctgcaccaggcggtggaagccaaggaaggcgtggaagtggagcgggaaaaccagacgtacgcgaccatcaccatccagaactacttccgcctgtacaaaaaactggcgggcatgaccggcacggcggaaacggaagctgcggaattccatgatatttacaagctggacgttcttcccatcccgaccaaccgcccctgcatccgcaaggatcagaatgacctcatcttcaaatcccgccgtgaaaaattcaatgcggtggtcaacaaaatccaggaacttcacgacaaaggccagcccatcctgatcggcacggccagcgtggacgcctccgaaacgctctcccgcatgctcaagagggccaaaatcccccatgaagttctgaacgcaaaaaaccaccagcgcgaagcggaaatcgtggcgcaggccggcaagcgcggagccgtcaccgtctccaccaacatggcgggccgcggcacggacatcaaactgggcgaaggcgtagccgacctcggcggcctcttcgtcctgggtacggaacgccatgaatcccgccgcattgaccgccagctgcgcggccgctgctcccgccagggggatcccggcgcctcacagttcttcatctcctttgaagacgacctgatgcgcaacttcggcgcggcggaacgcatgaccaagatgatggaacgcctgggcgtagccgacggtgaagcgctggaacacagtttcctgaacaaatccgtggaatccgcccagaaacgggtggaacagcgcaactacatgtggcgcaagcacgtgctggactatgacgacgtaatgaacaagcagcgcgaaatcgtttacggataccggaatgaagtgctttccacggaaaacccgcgcgaaatgatttacgatattctggaagaagtaatcgccacgcgcgcccatgaattcctggacccggatgcggaaggcgtcacccacccggacgaattgctcgcctggatgaacgcctccttcccgctggggctcacggcagaggccgccaagctggaagaacggcccatagacgacaccattgccttcctcattgacaaggtcaagtccacttatgaagacaaggcttcccgcgaacgcccggaatacctggaccacatggaacgccagatcatcctgggggccattgacaaaatgtggcaggaacacctgtacaacatggactccctgcgggaaggcgtgcgcctccgcgcccaggggcagaaagaccccctggtggaatacaaatcggaagcttacgatctcttcatcaccctgatggaaagcatcaagagcgaagccatcagcaacctcttcaaaagcaccaccaacctggacgcctttgaggacttcctggccagcctgccccagttcgaatcttccgacgaaaaccaggaaggcggaaccagcctgccggaaatcggctttgacggcatgccttcggacctgctctccgccctgagggaacaagtctcccgggcacgtgaacaacaatccgcccggcaggcggaaccggaacaggccccggccgtcatttccgacgccaccaccattggggaaggttacaaaccagccgtggcggaacccaaactggtcatgcccaagcgcaaggtcagcgtcgtgctccgcaaggaagaagccccccaggcgccggcagaaacgccgatccccggagaaggggaagaaattgccgtcactctggactcccaggactttgcggaaaccatggacaaccgggattccgcggatacccgcacattctaaaaaagccgcgcatcacttacaggccggggaaaacgggaatgtccgttttccccggccccaaacttccggtccgccttggctacgctccctcccaacaaatccgccaatgtccgttccgtgctggagtatgttccgtacttcagggataaaatctttgccgtgcacgtggaacgccccctggtggattccggggaattggtggatgccctgctggacttggacgtactgcaggaaataggcgtcaggcccgttctgattgtggaaggggcggacgcctccgcgctgtacgaacacacgcgcgtctgtgaaatgcgctccgccctggtggaagcgccattgaagggcggccagcttgtccgggaaagagtccgggaaattctggggcgtcaccaaattcccgtggtggcttccggccgttccggctcctttgacccggaatccgtccatatggccttcagtctgggggcctccaaatacatcgccctgctcaatgaccacaaggttccgtccctggacggacgccccattgccgccattctggaatcggaagtagcggagctggcaggaaacgtaacccaccgcgaactgcttgaccaggcagcggaagcctgccgggcgggaatcccccgcgtgcatctgctggacggaaaaatgcgcggcgtgctggtggaggaactcttctctgaagaaggcgtaggaaccatggtgcacacggactcctaccgggaaatacgcccgctgaaggaagaagacattccggaactcctctccatgatcgcccgttccgtagtggactccaaattggtcaaccggaactatgaagacattgccgccagaatagacagttactacgtgctgaccctggacgacagcatcgtgggctgcgttgccgtttatccctacccggagcatcatagcgcggaactgggctgcctgtacatcaagcaccgccatgaaggccgcggctatggccgcgcactatgtgaatttgccaaaagaaaagcggaggaaatgggaatggaattcatcttcgccctctcccaaagcgccgtccattacttccgggaccgcatgcattacgcggaattttcccgcaacagcctgcctccggaacgtctgcgcactctggaactcagcgggcgcaaatccggggttttcgggttaaggctgaaatagttttctatttacctatctgccccgttcctgcttatgggcggaattccctgcaccaaatggacgggtagctattcccatctctcgttaaagggtatatagtaaattcgggaaaggtcttccatttctcttttcctcctgaaattttctgcccgccgaaaaaaatatcagcaataataatttgataataaaaatcttataaaataaccacataactaaaaaagaattatgcggatttttaatccgtccccggctacggcttctccgagcctttcgggtttagctgctttgatgatgcgccgcagcatctaaaacccatcccccccctccgccgcatttccaaaaacaatgcggttttttattttccagtacctgtccggtatcggagccttcacttcatgcggcatcctgaacggcaaaatcctgagaaaagaaaacgcagcttctcacaagcgggattccaatccaacattcatatccccgtgtggatatatgcaccggaataacagtactccacggttttccagagcggaaagtgccggggggaggcttccaatcgtcaatcaagctgtgcatcattgtgcatgcttttttgaccatatgataccctttttcactgttttctagcatgatgtgcaatatatgcactaaaagtaacaagccccttaaaccgttggatttaaggggctttgaagatggtagcagggaggtgatttgaacacccgaccaaaggcttatgaggtctttttccttctactcattatcaattagttatgcgttttgcattttgttagtgcattatagtgcatagtttataaatatgctttgtttgtggcaatgttggcaatgtgtatgctactacgctatacgcgcgcacaagcgcgcacgagaagccttatttagtcctcttacattcccatgatagcctgatccagccccggaaaaaaggggggaaggaatctctttgcctggggccgttccgatcggtgcttgggtgactggcgggggtatttttctgaaagtggaacggagtttttacggaacgcaacgccgttattattagcgtgttggaatataaaaatccagcgaaaaacggaacagtcagaaagagaaagcggggaataaggaaaaggaaaaatagcatgccaagacgaccaacggaagacagtttgaaagtgcgggctctggcgaaagctcacggcaaaacggagcgctgggcccggaaacagcgggaaaagaacacgcccatgtggcaagaattctgtgaagggaaacaggtgaccagcccggcaaaacgggaagacgcccaggaaagaacggatctggaaaaagcagaactgatttgcacggaagcctgggccgcatggcagggaatgaacggattgctgaacgcggccctgaaagatcccggcaagcaggatattattccgtccctggcccgcgccaccagggaatcccggaaacaatgggaagacgccaccaagcaccgggaagcgctattgcgtgcggcgggattgtggatcccggtggaacgggtcatggcaatccgcacacacttgaaaccgcttggatccgtcattgaaaagctggaagtgaacattgcgggccgcctgtctccggaaaaccggcatgagttttaccaagcctttgaaaccgccatgccggaatggaacacgggaatccgaaaaatggatgaatatatcactagccttttgccatgttagaagatctcctatttcagccgcgggggagtgtggtggaatgggtggaacgggaattgaggctaccgcgggaaacctccccaaacgcgccgggccccgtgtccctggatcgtcagccttacatgagggaaccgctggaatgcctgcgtaatacccggattgaacacttatatctggtttgggcagcccaaaccggaaaaacaacgctggacctcctggccctggcctatctattggaacacgatcccatgcccttgctatgggccctcccatccgataatctggccgcgcccttttcccgcaaccgccttcagccgtttctgaaagcgaatccctgccttgcccggcatatcctccggaatcccgcatcttttgccccgctggaaatgacgctggacaatatgccgatctacatgaccggcgtgaccagcccggcccgtctgtcatcccggcccattgcttacgttatccaggacgaagaagcgaaatttgaacatatcaacaaaaaggaagcgcatccgtccgccctgatcgaagaacgtacaaaagcctttccccggcggctgatcatccatagcagtacaccgaatgttgaagatgaaccctactggcagggctacagcctgacggattgccgggaatacttcatgccctgcccccattgcggaatgtggatccggtttgaattcagccgggcaacgctggtttgggacggggacagcctggaagagattgaagccagcgcccgctatgtctgcccggattgttcacggcccatttatgacgcacaaaaaatagacatgatgcaggcgggcgaatggagggccaccaatgaggccgctcatccgtcccggcgcgggtatcatttgaattcgctttattctcctttcgtttcctttgggcagtttgcccggaagtttgtggaaagttcccgcgcccttctggcgcaaatggaattgcagaacttccggaattcctgggaagccctgccttactcaaaatatcaggttaaagtgaaagatcaggctgtggaagccctgaaaacttccgcgtaccggcggggagaaatgccccccgtggaaccgctgtacctggtggccggctatgatccgggggaactgcaaacgcattgggttgtttgcgccgtgtcagccggcggggaattatgggttatcgattggggaaccatcctaagtttccggacggagggaggccggaaaggcgttgccgcccatttccccggattgctgtatcaggcaggggatcagatctttcagccggcgctgggattagtagattccggctggagcgcggaagcgacctatacggaatgcgccctgatgcccggtcagctttaccccacaaaaggatccgccgcgggttttggcgtctggaatcgcacggatttgaaaacgcatccgggccttgaactgtacacctatcaggaccgggccgcaaaaatcgaactatacgccgaacgcattgcacacggacgcggccctgggctgcaccttccggggaacgcggatccggatctgatcaggggattgagcgggcaagtactagaagagaaacccggcagccccagccaatggaagaaaattgccggagaccactatggcgactgcgtgaagctctgcatgttttcctggtgggtcctgaaatcatccgtcccggatcccgaaccggaagaagagagagaaagagacggcggggaataaggtatgagcggattttctcaagaaagtttagatgccctggcggagacttacagccttcaggaactcaaggccaaaagaaaggaagtagcggacaagctacttgaactggacatgatcacatccgccagcgggggcggcggcagcagctacagccggcaacaacgcatggacgcggaaagcctactggccgccctgaacatggcgatcaaggcgaagacggggcaatctccgaatccgggacaaagcgttactattgtaggatttaggaatacagattattgacatgaaacgacgcaagagaaaatacaagttacgcatgaaccgggcagatctgggctccatgccggaggccctgaaccagccccgcgccctgccccctcaaatgctcggaggcatccagggcgccctgccctgggctaacggcatgttgtactggcccacgctggatgacgccgcggaaatggatgattatgaccgggccgccgtcatgcgggccgcccgttacctgtacaaaaattcaggagtaatccggaaagcagtccgggacatttggctattgcagggctgcctgatgcctattcctacgacgcaagatcgggactggaaccggaaagcccgcgcggcctttctggcgcgggtggccagccccgccgcttttgacgttacgggaaaattatcctggaaaaccatgcaggcatgggccgaaaggaaaaccagcattgacggcgattgcctgtgcgttctggcgcgcggcctggacggcgggggaatggtggcctggtatagcgcgccgaagataatcaccccgccgggattgggtaaagaagacggctggaaccagggagtgaaaacaaacgcacaggggcgcccggttgcttatggactggaaacggcgccgggccgctgcatcgtcatccccgccggctgtgccatcctgtaccaacgggatccggatccggcggtcccacgcggggaatcagatctaatccacgccatccggcacggggtggatattgcggaaatacacggctttacaaaagcaagcgtgaaactgtccgccgccgtgggctttgtcgaaacgaaaacggaggcagacaaggcccccggaatggccgccgccattgggggcaaaaagaaaccgggctgtgacgaaaagccggaaaatccggcgcaatcctttgaaatcgtcaccggcggcggggcccgtgtagtcagccttgccccagggcgtgatctgaaagccatttatgaccagcggccatcccccaacgtggccgccttcatccgcgacttgctcgcggaaatcgcctacggcgtgggactagacgcggaagtcctctatgacatcaacacgttaggaagcgcggcggcccggctgatcctgtcaaaattgcggcgctggatcgacgaacggaaagacgcgcgggaagtgtacatgaaccggatttaccggcatatagtagcgctggaaatggaggcggggcgcctcccccgctgtaaagatcccgcctgggaaaacgtggcctgggtgggtcagcgtgatttgacgattgatttaggccgtgaagggggtctggcaatcaatctgatccgggaaggactggctgacgcggaccgctggacgctcgccacggagggcatgactgcagaaagcattttggaccgccgggcggatttgttgcgccgggctcatgaaattgccgaatcctccggcatccccatcacggaacttttgcctggcgccatcggctccacacatgcggcccatgacgtgcacccagggccgcctccggaagacgatgaaccggaaaatgccggcaacggggaaaagagcaaaagagacggcggggaaaatatatagggaaacctgtatcatatcatgaatagaaaaaaaacataccagttgcccatgctgaccatgcaagccggaacctccggcgccgtggcggtcgtggacgttaccggggttattgggtgggatgacgcccaatgccttgaatttgccgataagctgaaagccgccgctaatcagggcgcgtccagcatcaccttgcgcgtgaactcgcccggcggggacgttttttccgcgttgagcatgtatgatgccatccgttcatgcaagatccctgtccgtgcggaagttcatggcctggccgccagcgcggcaagcctgctgtgcatggccgccgatacggtagccatgagcgaaagcgctaaattcatggtgcatcagccctatgcgggcgtttgggggaacccggatgaaatcatgaattatgcggccatgctgatcaaagaaagggcccgcatgtttgccatctatggcggaaaatgcggaaagtcctgggaacaggtcagcaatgaccataaggccagcgtctattacagcgccgcggaagccattgcttacggctttgtggatgaagtcatccatgacgacgaaagcgccggaaacggtgaggatggacgacgaagaagaaaacgccggagacgaagacgacgaatccacagccaccgcggaaaccggcaacaatgacgaagaagacgacgaaagccctacaggggaagaaggggacgacgaagacgaggaaaccgccccggcggcaggcatgaccggaagccgcctgaacctgaaaaacgccgcgggagccatctgcatgcgtatttttggccttacgggatccgggaagaaaaaggatcccttgaaagcgctgaaaacgcagaacagccgcctggctgccatgaacaagggcctgaaggcccaagtggcgaagctgaaagccgcccaggatcaacaggcggcaatcacggaacaactggtggaaaaacaggtaacggccagattggcgtccctgaatattcccgcttccgatcttccgtcagccacggaaaccgaaatgaccgccccggcgcaaacggtagccctgcccgccagccgggaagaattcatgtctctgaccgtggatgaccgccttgccgtcacgtccgcctatccggaggccgtgaaaaaatggctttgaacgcgattgagattcctacgtcccggcccgtcagaccggagaatcaaccaagaaagaaatcatacgatgccaactctttacggtacaacgccggaattcgggatcaaaaacagcgaatccgggatccttgtcgaaagcatgaattttgacggatccatggagaaatacgaacagaaggatcatatgggaaaagtcattggtgtttatatcattgacgaaaaattaagcttcagcatgtccggagccctccccctgggaggggattatacgctgaccatgggaagcaccctccttttgaataataccattccgcccatttggaataacactcccaaagccacaacggtattcattgagactgtcaagcgcagcatgaccaacacgggccccgtgaaactggacgtgagtggaaccgtttatgcgttcggaagcgcttcttccgaagaataacaacatattaacattcaactattagaaaacaaaaaacatatgactatcgccaataaaggaaacaagccgtttaatatgaaggatctgttcccggtcaccaatttgaccgaccagaagcccagcatgcacatgacggaaaacacgaacagcattgccggcctgggctggaaaactgttgcaagcaaaagccttgccgcggtaagcgaggtttttgccccgctggaccgttacacaacggactacacggacgaaattgtgacttttgggccagggcgggccgtcacgctaaccattgaaattgccaaggaagtaggggaagccctcaagaacccggaagattggaacgtttcagccgtcaaaacggacgccgtcagcattgagtgcaaccgctacagccgcccgttcctggtcacgtcctatgacatggccgccggaagccgcctggaagggaagctgaacaaggccattgaaactgtagccaaggccgtcctgaaggacttgcacacgcagatcaagaccgcccagccggaagtaatttccggcgtgacgctggaaaacttcacgccggaatacgtggcaaccgtgctttccggactgatcatcccggaagtgtccgccctgacggtgaatcccacctaccacgccaagctgacgccttataacgcggacagcctgaaattggaaaccggcgtgtacgggattggcggcatttacaaggctaccggcctggaagacctgtctgacgataaaaaaaccattggatatatgggatatgaaaatgccatcggcatcatcagccgccagcccttgattcccgccgaaaacggcgccattttcgtttccgaactgggcagcgtcggaggcatcaagctttacctgaaacaatgggttgttcctgggatggaaggggttatgcactccgtagaagccgccgtgggaaccgttgtggctctgccgggaaatctgcggttgttgagtaccgccgccgcggcatccggaaccgcgtccgaaaaagccgccggagaagaagaccccgcggcataacctgtccggtatttgctgaactatgggccgccgtcggaaccgtgcaaacgtccgggcggcggccctttttccgaaattatcatcaatgagtgtacgtgagttattaaccgccggcgggaatgacatgatccgggaattgggggaacgtgtgcggctgttgcgcaaagggaacgtgtatgcggattgttacgccgttgtttcccccgccgccgtggggtacaccgtggaaattggaggcgcggaaaaacaggttacggcacattgcatgttgagagcccatgaccttcccaagcttccgcgggccggggaccgcctcaccgtttccgccccgctgggggatcagccggtcatatattatattaccacggtaacgagcggcaacacggatcctatgatccacatggatcttgcatcatgaaagtccgtgcggaattcaacatggccggcttcacccggctttgccgggaactggaagccggcgcccaggaagcggcccatgaagccgccctggactatggccggattttcaccaaagcggctattgactggacgccgccttcaggcgggggaagaaatggcgcccgcgtccagggagcggaagcgaaaaaccgccaggaaacgcggatccgctgggatattatgggctctgaatttgccaagccccgctattaccgttcccgcggccaactgatgacttatgatgacggcgcgcaccatctttccccgtttatgcttgcgcgccctaaagatcccgtgctgattgtggatccgcgcacgcacttgaaacgatttgggatgaaacgcgggcggaagggaatgaagctggactggcacggcccgcgggcctggacgacaaaacaggccctgaacgcggaatataagcggcgcctggcccgcgtggggcgcatggccgccggatggatggccggagcggtattgagcggacggaaaaccggcatccccgcctgggtgaaacgccacggaaccggcggcgggcgggcccggctggtgaaccgccgtggaaagtgggaaataatcattaccaattccacggcgtaccacccaaacatgaactttattatcaatcaattacttgatgaagtagtgaaagccaaaatacggaagcgggatgaaaaagtgaaatcatggctgctgaaaaaggcgcagcgcaccatgaggggataaccggaaacatatcatgaaatcatgatacctattttcaaagcaggcgatcctttaagcgcaggaaaattcaatgctcttggtgacagcatccgccacctgtcggaaaacgtcagcaccgcaggggaaatgatgatcccacagcattttgacgccctgcccctgccggaaatggattttgcggtcctgtaccggaaggacgacgcgggggcctggggctggtgctgccaccaggggcgcgtaattgttaaagggaaagaatatgttgtaggggaaaaagaatggaccctgattgcgggcgatacctacaccggggaaatcaagcttgttgtcacgctggatgatgccggggaattttcttccggcgtggttcaggaaggaaccgccacggaaggaagtggaacctccctggaattttcgttggctaccattggggaagaacttatttggcggcacgccggggggcctgtttatattatccgtccggacgaaattgtcattaaagccgggaaaggaattcaggcggaggaagaagaagaagacggagaaaacggaaataaaataaaaacatggaaaatcagcgccttgattgaggacgcgaaagaaccttccaacggagattgttccctgatttacgaagaaaaggaagacggcgggaactccgaaggaaatcagggaggaaatcagggaggaaatcagggaggaaatcagggaggaaatcagggaggaaatcagggaggaaatcagggaggaaatcagggaggaaatcagggaggaaatcagggaggaaatcagggagggcaaggcgaaaacaagggagaaccttacaagctgaaactgttatgttcttcagacggctcggtcaacattgaggacaaagaagggaagctgtctttatccgcccaaaaagtggaacctggggatggcctggaatggaaaaaggacaaggaccaggacgggaatgacattgatacgcagattttacagatcaggattgattcaacggcggtagattccaaaacgccgggggaaaatggaaaatggccgctgtctttgtcagtatctccggagggtttggccggggaacttgatttaacggtagataccagcgttcatgatttaggtggaggagctaaggtaggattgtccacggaggcaggggctctttctcttatagttactcctgggggcgacgcggaagaattgagttttcgcacccctttgcggaaaaatggaaagtatgttgtgctggattatgtcaaggatccgcacaccttgccggacggaacaacgattgccctggggttatcaggcacccagcttgatttggtggtagatacgtccaacacgaccggcggcggggacggagccctgatcagcgattcctggacggcgttggcttgcgatagcaatcacgcgatccgcctgcaccgggacaaaaacggaaaaatctatatccagcaaggggtatggatcacatcaaatatttatgaaccaataaattaaataaaatgaactacgcaatatttttatatcgagacgatcaccaatgcttgaaaatatgcatggaacaaatacggagaatagaccaggccgcccaattttatttatttgatgacgcggcgaagcctttattcccggcacaagtccccacaggcaacgatatattttacaaaatcacctattttgcccgcggggggaacctgaacggcctggaatgcgtgcgcggcatgctggggtgtatgctggacatcccaggggatgatccggtcatcaagattgacgctgatacgctgctgatggatccggaggaaatcacgcgcagcctgaaagaccgcgggaaggtggcgggggggatgcaatgccgtgtgccgcttgcctgggccggctgctgctactggatcacgcgtccggccatcaaagccgcgctggaattgctgtcccggcgggaatggccggaaaatgcccgtcaggaatacccggaagaccagaccatttcaaaaattctgttatacctgtacggggccgccggggtggacgtgctggaattccggggcgggcggcgtctgattggcgtccggacgtgtgatccgcgcgatctggcggaaatcgcccgcctggcgcgcggcggcgtgtgcgcggttcattgcgggcaaatggcgttttatcatcctattgtggagcgtgacggagggacgatccgggaagcgtgcgcgcggatcatggaagccgtgctggaagggaagctgaaagagaaagaggggatatagttatatgcgtgaaataaccaataccacatccattctttccggcgatctgccccaggcggaagtgaacggcctgaaagtccggcctgtcagcctgtcaagcatggctatgctggaactcctgaataactcctgcctgacgcaactgaaccgccgccgggaaggtccattgttggaagacggcgccgagcctgcggaaaatcctccggaaaaaatgagcatgtacgccctggcggaatttgtctggatccacgcggcgccggaagaagacgtggtgcggctggtggccggcggcggttttgacgatgcggcagccatccgccgggccgtcctggcctttgccggaaaagtggggtttggcgcgctgggggaaattgtggcgggcatgacgcgcgaaatgaacgcgatcatgtctgcccaggcggaggggatcaaggatccggacggggcgccctcaaaaaactagcggagccggacgggtgggcgggattgattatgatcatggcccgcgcgaccggctggacggaatactatatcaagcacatgccgttgaaaatcctgctccaatacgtccatgcgtggctagtccaggaaggcaatgctacccgctgggcctatgcagaccgggcaaaacaacgtgccatgcgttcccggattgctgaaatcatcgaacaggacaattcatttttagctacttatggcgattgaacaagtacagcgcagttattgcgtagtcaataaagggaaaggggagcctgtctccgggggctatacggaagaaacctgggaaggaacctgggctgaaatgtgcgcctatgcggaccgccaatcagccgccggcggggatttgtggaatatcacagccaccgttacccggaaagccggggattttgcggaatgccgggtgcgccgccaggccatggacgggaaggaagaggaagaatttgaaatgccgggaagcacccgtgaaagcccgcagtattccctttccgtgacctgcgtgccgcagcccattttaacgcacacccttgcggaaagctattccggggaaacgctggacgccctgaaaaggctggtgaacgggggctgcatggggtctttggtggacgtaacaaaagacgggcagccattgcagcaaaaaaccatcagaagcattcttggggatgataacagtaaattgattgaaaagataaaaaagggcgtcacgagcttttacagcccgcaaattgtgctgcaagcccgttacaaagtaacggatcccggaacgatcaattatcagaaagcatgcacgattgccgcgccgccgggcccgtttgaatccccgtccggaaaattcaactggctgtgtatggggacgtccgtggaaggatccgggaaggaatggcaagtgacggattcctacatgctttccggtccggacggctgggacgaagacatctacggcaaataaaccatgaataccgaaattgttgcacaaattattgcggaggcgcttcaggaacgcccggaattcgccggcgtgcctgtctgggaaccaacggacggcgagaaggaaggggacaaggcccttctggtgaatgtaacaggcgcggaggaaatcatttccggaaatttcacctaccaaatttccggtgaaatcatgtaccggcaacggtacgcggaagcggagcccgccgccctggtgctggacgtaactgccttttcccgcgcctgcgcggaagtcatggccgcgcttgccggacgccggaacggccaggacgcgcccgccgcctgggcagtcctgggggcgtcatcaacccccgcgctttccggcacatcggaaacgttcatggtttataagtgcagttacgaattattcattcaattttaacaaattatcaatattatgccggataaaaaaaacgaagacggcggcgccatcctgacgccggaagattttgacagcacgcgcaacacggaacttgccgcgtgcctgatcacattggggttccccctcctgaacaacacgccgggtttttcccgcgtgattggcgaagggatcgccgggcccggcggggctgtcacctggtggtttgggaaacgcagccgggatgggaaatacaccatgggagaagtgcttgcgcgctgggaagactggaactggctgaacgatccgaacaaccttgatcctctggcctatatcatcacgggctttcataacaaacggaggctggtggatgaagtgaaaaagcgggaagtcatggtgcttgtgcaatccggcgcccgccatgccctgttttccaaaaactgttcccgttccaccctggaccgggtagagcgattcatgggattttaaccgtttgaagcaatgtctgacgtaactgtgacgctgggagcggatgccgctgaattcaagcaggcattgacggaaattcagaaatccgtggattccctggtgaatcccaccacggctaaaacagcgcagcttggccttgcgttttccggcgtgaaagacatggtttccacggcctttgccgctattgacggagctgttcaaaaggcttttgattttgtcgcgccgtctgcggccatccaacgcgtggaacgggaattgacgggcctgacgggaagcgcggatgaagcaaagcgcatccttgaaaccatcaacgaatgggccctgacctcccaatatacccccacggaaatgttcaaaaacgccgcccagttaatccgcggcggcatttccgaaagtttcgcgcctgatctggtccgtcaacttgccacgatcgcccagggggaccaaagcaaaatgaatgccctggtggccgccatggtcaagggttccggggggctgaaaggttttaattctgaaatcatggaggcattcaacgccgcccaggtggatctgatgggagccatggaaaaaacgtccggcctgtccggctatgcccttcaggagaaactgaaagccgggattggatttgacgacgtggccgccgccatccgggaacttgccaaggaagacggccccctgaaagacgcggaaaaggaagtgggggaaagctgggaaggattgctgaaacgggcggaaaacgcctggggcaacctgcaggaaaattttggcgccggcttgctggggccgttaagcgcccttttggagcaagtggacgcccggctggtggaatggggggacggcgccgcggaatgggggcaaaaagcgggggatctcctgttccgggccgctgatgccgccatggcgttaggcgaggcggtagggcccgccctggccctcattgcggacaatgcggatcatgtctctacagctgttcttgggattggagcggcttttctcacgtcccgttctcaaatggtggccgccatggcgcagacaaagggcagcctgacgtccatgtcctcctgggtattgctcgccaaaggcagttgggcgggattgtggaatgccatccggacgggcgccgccacggcggcgggcgtgatccgcgccgcagcggcgggaatcgcggcatccgtccgcgcggccatggtcgccatcaagggcgccattatttcaacgggggtaggtttggccgtggtggcgattggtgaagggatctcttacatttaccggcagctttccggagcgccggcagccccagccggcggggaagaaccttataaggatcggtctttgaaagtgaattccgggcaaaaggatcgagaactggctaatgaacggcgggcattcaatgccggcatggctaaagcgaagacggaaaacgatgtagatgctatcggaaacagacttcttgctaaattgcgttccgaaaaggatcgactggcagaattagaagatgggggaaaatgggggagttccgaatggtcgatccaagcgaaatttgtttctgattatgaagacctgtaccggcaattcaaattatatcgcgaatccacaattaaaaggattcaggaccaggccgccgcggaaaaacgcctggcagaactcgccaaggaacgggaaaaggcggaaagggaagcggagcagaaccggaagaaactccgggaactggaagcctcctggatgaaaagcgaatctgaccgtacctataagaaaaagagcctccgggaacgcggggaatggctggaccgggaagcccgcggcatgggttccgagcccggcatggccggcatcacgtcccgcattgccgaattgtcccggcaggaacctacggatgccgtgatgaatcaaattaaggccctgaacgatttgaggaaaaaatatgcagaactgtctgacgccagaaaagattatgaaaaaatggaatccggggcgcgccggaatcaggagttaatggccgcggaaatagcggggcttgatcaacgggcgcaaaagatccgggatgaaatagccctgcgggaaaaaacgaaaagctaccaggacgccggcatggatgaaaaggacgccgctgaaatggcccggcgcgacgtagcgcttgaacggatccagaccaggcagaaatccctgggagacggccccggcctgaatgacattatcaaacaaagcggcgttgaagtaggcaacggcggaaagagcctgggcctgtcatcctcgctcctgtcggcaacggaaaagcaaacattgacgttgaaagacatacaaaggattcttgaaacctggaagcccggccagatcgtcctggccgagtaagggcaaaagagacggaggggatatagttatatgcaagagcccgctacattcaatttttccgccacggcacatgttccgggggagctggttttgacgcttgatccgccggaggaagtggatctggccggttgcgcggtccgcgccgccgttgctatgtccgggggctgtgtccggctgctggattgcagcgccgtcaatcccgaaaatattgttgccatcaattttcccggactttccgccggctgggctttttatgacgtgttcctgaccttccccggaggcgcggaaatgccgctcctgaagggggaaatagatattgcccaacgtgtcacgccggcggatccgcaccaacgtgcggaatggtacgtaacggccaccctgcccggcgcggaaacgggccgggtggaaattcttttggctcaagggccccgtggcccccaagggaaaaccggggaacgtggcccggaaggccgccaggggccccaagggaaaaccggggaacgcggcccggtaggccctcaggggccgcaaggggaaaccggggaacgcggcccggtaggccctcaggggccgcaaggggaaaccggggaacgcggcccggtaggccctcaggaccgcaaggggaaaccggggaacgcggcccggaagggccccaggaccgcaaggggaaaccggggaacgcggcccggaagggccccagggccctcaaggggaaaagggagatcctggtactctgacatccaacgttggcgatgtgaatatcgggggagctctgaccgcggagtcagctaccgtgaacgggcctctggtggtcaacaacccggacggcagcggaagcgccggcacgctgaatcagatttacgggatcacccggttttaccagtcggtcgatcttcggtcgggcggatggctgagagggacattcatggtagagaccggaatcctgaatattagccagggcgccagcttcaactgcgcggggacatccacgttttcaagcgccatcaacgccaatggaggcgtcaacattccgctggccgtgggagcgccgaccaatgaatccggcgtcaaccgcctgtatgccgcgggcatgggaggcgcagccaatgcttatgcggcggcggctttcctgaatacggactcgctgacaactaccggcacggcaacggtgactaaaacggttccctaccagatggcccgcataggcattcccccgggcgctcacacgactattcaggccccctttgaaggccccagttcccaatggaattattcttcctgggccggcttttcatttgtctggcgggccacggccgcggcgaagataacgatgggcatcggccggggagcgaaaacaatcagggcggaccttaccaccgactcctacacgattattccgggcaatgacctggcatttaattccggggagattctggacatcacctttgacaacgtgcgcgatacggctcgcaacggctatacggtgcgggtgcgggaaatttatgcgctgacgtccgccgatggatggcaggtcaagacgacgaccagctttatcccggcgacgcagaacgagcccgtcccgtggacggtgtgcaagattatttaccagcagcagacggttgccaacagcagcgtttatgaaaacctgggaggactctggctgctggttacgggggcacagaccaacaacctgttcaagattgccacctgccggggcgtctccaatttcgagaccggcgtcggcatttcccgatgggtgacggatgtgatcaacacgaccggcggcgcccagtccgtttacgccgggcccggcgaatatgcctactatcagcccggtaacgtgaaccctgtcttttacggtttggacgcgataggaacgaatgccgttgaatccgaggcaaccgccgcttttgaagatattaacgtaccaatagaatgaacagcgcagaaatacaaatacagttcccgaaacccggtcaatgggatgaattcggactggcggccatttaccaggacgaggaagggtacacccgcatagaccgctatacgcaggacgatataccagcggagcaggccctggccatgcaggccgtcgttgccgcgctggtgggattgtccgagccatggcaggcctcccaggtttgggcgcggctggatcatgttcttgccagttggcctatttcggaggatgggccatttgaaatggcggaggccatatcattgactgttgaggcggttaatgagcaagggggacgccgaatttttcaccccggcccaataccaggagttcacaatcaaggatcccgccgccgtggactttttcaaacacttcactacccccaatcaataacaaccataatcatatgactactagtaataaatgcaatcacgccttggaaattgccgaggatatgtataacgcctatgccgacggcaaggaccgctacaagcaccagccgatggtgaaatacgccgacctgccggacgacgataaagccggctggctgaacgtagcagaacaggccctccccatcatcggcaagcatgctatggaagatgttaaaaactacctctccgggcaggccaagacctccaccggcttgcggaagtggctctacttggccggggtgggcattgtcggtgctgtccttggcggcctgggaatgtccctctccggctgcggccattccgtggacgtaacgccgaaaaagacggtggtatgcaaggacggttcctgcctggtgctggaaccggggcatatctcctacagtcaggtacagccggaaacggacgttccgcccgtcgttcaatccctgaaaaagtgaagccatgaccggatctgttgtcaacgcgggcctgctgggggctaatgccctgtccgtgattgcgtccgtcacgtcaggcaacccgtttttggagtacatccagaacggggcgagcgtggccgcggtcatgggaatttttctgtggcgggaaatgaaacgggcggaacgttatgagcggctctatgacgaggaacgcaaaaaacgcattgatgcggaaaataagtgttccggctgtgagttcgtccgcaaggcgcatgaagaatttctggacaacagggactagttccaactgtaaagtttttcttaccagttccaactatttaacaattaaataattatatgattatcaaagaatatcaggaattcaaacccgttcagcgggccctggggctgaaagcggatggtttgccagggcctaaaacgctggccgccgtagctctgaaattgcgctgtcatgaaatatgatccgcggtccaggccgccgtgaacgtgacgcctgacggcatccccggccctgccacggcccgcggcattgccgccgccctagacattgccctgccccggtcctggcctgaccaggcaaccgtccgggccggtctttccatttttgggcggccaggggacgaaaacaaccttgtttctattgtccccccttatcctttatattatgagggaaggcccgtgaaaacgatccgcgtgcatcaggcgatcgcccaggacgttcaggcggccctggcggaagtcctggccgcgtatggcctggaccggatccgcgcgcttcacctggaccagtatggcggatcctacaatgaccgcagcacggccggaggcaaaagcaagagcatgcacgcctgggggattgccctggactttgacccggaacggaacagttattcctgcaaggccccccatgccgggctttcccgcccggagtgtgaagaatggtggcggatttgggaagcccatggggccgtttccctgggccgtgaacggaattatgactggatgcaccttcagttcgcgcggctgtaaaacagtaatcttttgagcgtcaaaaaattacagataaaaatatcttgcggaaagttccgtttttctgtatattggccgtgccggttgatccggagcggatggaaatgagttcatccgtagtagaaaggaattaacaatgacttgatcaagcacatcgacctaatacaacggctgattgaacttctcattgttctgctcagctaaagaaaaacccccggaggcggcaacctccgggggtgatttttagaaaggaatcaatgattgactacattgacctaatacacccttactatgccctttcttccggatttgtcaagcaggcgtttgtcatgcgtgatcagcggcgttatctggttaagacggcttccggattccgttccagaatctccagaagtttggccgccgctcctgatggggtacgttccccgctttcccattttttcagggtggatatggaggttcccaggagtgcggcaaattctttctggcccatgtccagggattgccgcagtttggcaaccttgttttttgcaatccaattccgccgggatcccggaacaaccacccggatccccctggcgggaagatcatcccccagcgcgtccagtaaagcttcttccgcctgatccagttcggcattgacttcttccacggtttgaccgcttacgcagggataaggggtaagctccgggagtttccccagatatttcccgtcctcgtcggaccagtaaatgattctcgtgtagtgtgcttttgttttcatcatatgatcttactaatttttctgtcagggatgagagtggaggaagggttattcacccttcctttgttttttggcttgctctgtcaggcgtttcacggctttttcctggtagtggtcggcatcgtcccccagttgtccgctaaggacccatgacaggaccccagcttgaacacccggtgggagcctttaccggggaattctttgaaacccgctttcaggaggtcttgcctcaactctcgtttcttccttggcatgagtacagattagtacattgtgttccttttatcaagaaaaaaagaacactatgtgaacttttttattttcatcgtaaaaaggccccgactgatggaacagccggggccgattgtttaaaagatgttcggcaatcaatacgcctttactgtgccctttcttccggatttgtcaaaaggtgtgttttatatgaaagcttgtactataacttagtaaaatggaacactagataatagcattaccaatttatgtatatattggcaaacaatctggaattaaagaatattccttatttttccattcagaatttattatttcctggccattttcactattttcagcataaataatttttatatcctgtctcttttttattttatcagacatcctaagcttttgataccattggttaggatctatttgttcacgagggaaattaacacctatgatcaatccagtaagatatttcatcatgtgactaaaatataaatttccacgttcatctttgtaaattgcttcctctacaggaacaatcatacgttcctcctgttcctctttccactttggatctttcgttgtaaataattcctctgatttaccaagaggaatagcatttgataatggtgttttattaataccagctttttcaccttgcttgtaaacgacgggcaactgaaccttaaaatcatcataacgaacaggataaagacgccccaaataagaagatgcatcttcaggaaaaccaacaatatgagaatatcttactccattttgacacctcaaggaaacattacagttaaatacaaggcacaccccgtgccctttatcagcatatttttcccatagatgattagaagtacataaattagaaaaacaaagaatccggtacggtaaattttcaagatcccaatttccctcataaccttcaggagtccactcttcagagtcattcgtattagctacatccgtccctttcaactgccattctgtgagaatttttttcgttatatcccatgactgatataaaaaaaggtttatttttctgggtatcattataagattaatcaattcatcccaatattcgggataaatttcttcatcagaggcataccaatcaagaaattttggtatgttaagctgttctgcaaaccattcttcgttatgtccttgtcgttttaaccattctttaatctcttgttttgttgccatagttatgattttttcaacatttgttgactagctttccggaaggccttttcctcattctcataaagaaggaatttgagggcaggtattctttctccatccatttcaacatgtccgtttggaatcgcttttatttttaacaacgtgtcttttgtgatgccctttttcggaattcctaaaacaatatatttgacgcttgtgtgctcatggacgcaatttccatcatagtaagaataaggatgtaccaggattccatttttataagttccatatacggccagctgatagtattcggaacggtttaattcattcaagaagccacgcaatttttcctttgtctgttctctttcctcagcctgttttttctttttttccaatgctttttctttcagggcttccatcttagccgtttccctggaaataatttccggagtgatgccaagcgcagtttgatgttccggagccagttttgatacaggtatgcttttcgttccctcgtcatgactgatttttgccgtcaggccgcctttataagaaatggtagcgttcttgtaagtgtcattaccgatagtcaatgttgggacagtaatatttcccgcaacggcgggaagagccagacaggacgctatcagtatagaaaacagattttttatcatgcgttcgtgatagcataatatgccgttttctgtccagaaataacatttttctgtggtttttggttgccaacaggaaagaagaccgttaatgaaaaatagttatgattacggtgactttgccatttgatgaaaatgatcccatgtttgcgcggaattgcgggagccggaaaacggatgtctatttatttgagatcgccgggtatgcgctagcctgtgacatgggcggcattactcctgatgcggaacatattcctgataccatgaagggattgacgcgcgtcagaaaagaagaaggagcatcaaacgtcttatttgccctgaaggaaggaaaaaccgcacgggaaattggggagcttgctcttgacatgatcaagaagcggaatgacattgagacggaaacggaatatttattctattataaccatttatgggtcaacatgcttcggaatttcttcgttttcgccggtgaagaaagcgcaacacgggaaaacatgtcttatttggctcaattcttaccggacgagaaatttgcatggtatcctttcaacgcaatgcggcgcatgttcaccgcgtattttgagaatggagaaaaccgtttgcggcttctgctttttcttagatccctgtgccgtggggctgtgcttgcgctttcttcttaccatgtggaaaaacagcttcaggggaactatgaagaagaaaatttcccggcgttcaggcgtacatggtgccaatttacgggcaagtcatcaacagggccgcgaaagaaccttgaaaagattgtggagatgttgggcggcggggttgtcgggaaaggtgcccgtcctgatttgctgatctggtgtgaagaagggtctcccgcttacaaatatgataaaatcggcgggaagcttgctcatgcctttgaacccgattcgggtacgcttgtcattccagaagaagttttctggaaggaagtagaaaaggaaacaggaaagactaaagaacagattctggaagaggttaagggataactaaaaaaatttgaaaaggccggtgtcttccctgggtgccggcctttttttgtgtccaaattcaaaagcggtcatgcgttgttatctggctcctgggggcgcgttataggtataggtggagtgtctccaagaacatgggaaatgagtgaggcacaaaattcatcgatgctttgatgcattcgcgcggcttctgtctggacaagcgaaatgaaatcgtccgggatcaacagcttgacggtttggcagtcattcgtttctgaaaatagaaaatcaattattttcattgatttttccgggatgggcacgtttgttgaaaggtatttgtcaaccgtagctttactgacccccagccgatcagcgagccatacccggttttttccgttttttttcaaccagcttttaatttccgcttttgagtgcatggctggaaaataggcgttttaggacaatttgtcaaattcccaaaacggaggaataggaaaaaatggaaaatttgatattgacaaaataggcgaaaccgctcattttattgctatggtaactcacattaatttgaaaaactttccgttttcgcttattcaacggttgagatccgttgaagcgtccacggggttaaggattgattatttgatgcaggcagcactcattcaggggttgagagaatcaaccgtccaagagtgcggcagggtgatgttgccccccatgccggctactccctctgtttcccctgccccggcggcttccttgatgccgtctgccccttgcccggtgattgttgccggggaagatcctgacctgaatttgaggtaataaagagatgaatcactcttccgtcagcaaacgggcaaccgccgccgtcaatccttccggggtaagctttttaagtgctgcaagcccggcggaacaagataagcggacgatttccgcccggctcatctcaaattcttcagcaacggcctcaatctctgcaagttgctttgcagtaaagcggatagggataggctttccgctgggtcgagtttccggattctttgggcgcataatggaggaatatatatggtataccctctatatacaagataatacctaaaagaatactttaggtatacaaattttattgacaagagataccctaagtataccatgaaaagcatgagcgagctatcaaagcctattccaatacgcctaagagaaacggacaacgaagaactgcggggcctgtccgcgggaacgtcagtaccctttgccgttttggtccgtctggccgtacagcatggactgccaactttgaaacaatccttgcggatatccgcagaggcgaccgccggccccattccggctactccctctgtttcccttgccccgacggcttccttgatgccgtctgccccttccccggtaattgttgctgggaaagatcctgacctgaatttgagataaacaaccgattagaatcatgaaaataaatacagcattcaatccggcccccatgggagaccggcggaatatcaatatcatccatgaaagactctccaacgttccgccggatgacatcataaaaaacgttatcaacaatgcgcgggaactggtggaagggctgccgcgggtgcaactggaagcgttggccggttcgctggttacggaaattcttctggctcagggcctgggatgctctgaaatccccctgaagaatctggaacaaatgatggggatggccggagtttgtgcgaaatgtgaattcaagcccagcaacgaaaatggaacaagtgaatcctgaaagcgtggtggccgtggggaacgtgcaaacggcaggggatcagatcaaatatctgccccgcttttgccgcctgtacgatctgcccaaaacgccgggcctgttcctgccggacagcgcccccagcaaagagacgttgcggacctggcgcaacaacggaacgctggtcatggtgaaaatagggtcgtccctgttcgtggatctccacatgaccttgaaaaagaataaaataaaactcggagtgcttaacaattagcgtttttatgagcaacaaatatgccgcatggtatttgcgcgtgcaggtgaaggatctggaacagcttccctttcatccgccggcggaaaatgaagcgggggaaggattgcccgctgattttccgcgtgaggaattcacggaggatcagcttgtgctgctggatgaatactaccacgtcaagagggaaaacgtggtgaaacagtttttccggctgctgcgcatccatcccggcagcatggatttgaccctgtggcatctggcacttaatgccggcatcctggtaaaactgcttgggataggggatccccgctcctttacctggcgggaactatgtgaccgtttgggcgtgggggaagatgtgctttaccggcataaaaaagaaattctgcgcctgattgatgaaataaaaaaataaccttcaatatcttatgaaaacaatcaattacaaattcattttttcaaaaacatacgacagcctgaaagcggaagggacaaatatttatgtcaaacaagagggtcgggcaaatggggcgccatccgggggccgtggaattggacggggagaaaacactacagttctacgccgtcaggagccgtaaacaaactgttgaaacgagaagaaaaagaaggatggaaataaccttcaatatcttatgaaaacacatatcaaagaacgtcccatccccttttccgcggatatggtgcgggcgctgctgcaaggctggaaaacacagaccagccgcacgcgcggacttgaacggttcaatgggtggccggacaggaaaatccccctgggggaagatgcctgggaactatgtcattttataaaagaagagccgggcatctggcgcgccattttccaggatccgcgcggggaatgcccgcctggactggatcctgtggtgaaatgcccctatggcaaaccaggagaacggttatgtgtgcgagatccttttttcaatgtgtatgatgattggttccggctcctgctggaaataactgatattgaggtcaggaaactacaatccattactgaagaagaagccatggcggaaggaattgaaaccattttttacgatgaagaaacgtcctccaccggctggaaaaactatctggatccggaaagcatgtgcatccgcgccagagattcctttttcacgctgtgggatcgtctgcacggcgccggggaagcggaaacggatccctgggtatggatgatcaaattcaaggtattgaaagttaaagggacaataaaatgaaaaaacgatatacgcttattggagtaattcatgatccgggggatgaagattattgcctgcggctcaatgaaaacggatacgtgctcaatatcctgatcacagaccgggaatatatcatcccgctaaacatcaatttgaaaacgcatgatattcgtaccgcccggaagaaaaggaacaatatatataaatcgttgtacgggaaagaatttaccctgtaaaaagcataaaagccgtactgcgatatttaggagggaaaaaccgatacgcgcatgaaatcacacaaggaacttgccgaggaaattttaggctatccaatcggggaagacgggtgcgccccctgccccggcgccgcgctgcataccacgcaaagcgggccgcgggattggcggatctggtttgacggcgaaggaaagccgcatgaatattgcttccatcaatcctgccagagcgcccgcgacgacttcatgagggtgctttaccgggctatcagcgcggaggaacgcggggcccgcagcacccgcaaggcaacccccaaataccagcgtcccctgcccccggcgcccaaggcgcggaaggtaaaagcggaagaattgaatgaagatctggcccttgcgctggcgggccgggtggaggaagaaatcacgtttgactggctgagggatcatagcccggtggaaatccccggcaatccccgcgcctggggggaactgctgctgaatgaactatatcccgccggcgcgcggattctggtattcacggcctttgcctctcaagggcaatatatgtatatcgtgaaggatggcgtttacaagctggggcggaaacccggcgtggagcccgtaaaagccccgcgcctgcctgccggcggggatgccggcgtctggtacttaacggcgcccgtgacgggcaaatgggaacccaaccccggcaaacgggatgccatgggaaatttgatgccggggcggcggcatgcggcatgctgcacgtccttccccttcctggtcctggaaagcgacgtactgaccgcggacgtatggctgaaaattctggtgcagcttgcggatccggttgtggccgtttacaccagcggcgggaaatccgtccatgccctggtgaaaatttccgccgccacgccggaggaattcaacgccattaagtcagaatacgtcttgcggctgtccgccgtgggagcggacaccgcggccatgacgcctgtacggctgtcccgcctgcccggctgcatgaggcacggagccaccggggaaaacgggacctatttcaaatacgaccaaccgcgcctgcaggaattgctttacctgaaccccggcgcggtgcacggcgttcccatcctgaccatgcccgcgcggcaaccaagaaaggcagcaagatcatgagtgatttgaccaccgcgcaaatattaggcgcggcgcccgtcatggtggacggacgccccaatatccgcaccaaccagcaagtgagcctgatcgcccaggcggtagcggacaacctgccaagcggcgccctataccggtatcatgacgagtatgtgaccatcagcaccatcaagagcaccaaccaggacggggaaacgacgacggaacttgaaaaaaggcccatggatccccggcgtttcacaacgtggatcgaacaatacatgaccttttccgccagtgcggaagatccggtggaaagcatggggaaaaatatggcggaattgattctggcgagtgattatctgcgggccgccgtgccggaaattgcggaaatcatgcccgtgcgtctgcccgcctggggcgtagggcccaagggagaacgcttcctgcggatcctgcccgccggctatgatccggccacgcgcatttacagcgcggaaaccgtggcatgggacgccaacaaggtttggccggtggatgctgttctccgggcgatgaacagagccctggcgtccttcccatgggcggaaaaatccgccgggcctatcacgcatatccgttccgcatcctgcttcatggcgtatatgctggggcagttctgtcgccacctgatcgggcgacaacccatgattcttattataggcaaccagccggggacgggtaaaacgctgcttgccaaatttgcgctaggccccatttatggagtgccgaacgccacgccgtttcccaaggatgacgccgccctgcaaaagctgttgtttaccaagcttatttccggggcgccgtatgtcctcattgatgacctgatcaatttaagcagcacgactttgaaccagtatgccaccagcgaggccatttctgatcgcgtcctgggaggcaataaggagttttgcggggtcaaccgcatgcagattgtcagcacggggaacaatttgacggtaacgccggacattgagcgacgcagcctgattattgacctttttgacgtgtgcaagtccgtcgaaaaaaacattgccaatccattaacggaaaaagtattcagccgcccgcaatggcgccgggaaatgctcatggccttgtggtccctggtctggcattggaatgaacagggctgtccgtccgtgtgttccgcgtccgccatgccgtcctttgaaggattttcggaggtagtgggatccatcgtcatgacggcgggctttatctccccctttaccaaacgcccggccaccacggacggcggggacgtccgggggaatgccctggaacggctgctggtggcccttgcggacaagatacagccggaaacgccggaagcgccccatacgcagctgacgcacctgtacacggtggaagctgtgatgggcgtggccggggatctggggctggtggacattatttgcagcggcaaaaaccagaatcagagcatggggcatcaactgcggaagctcaaggggcggcaatttgtggacagttccgggcgcgtctttacctttggccgccgggaagacgccgtgtcttcacaatataatgtagtcattctttccgaaccgcgcatgtaagacggcttattcaagggagatccccccttccgggatctccctttttttgtcccgtcaagccgtgtggccggctgtttcgccgccggtggccagatattccggcgtcagggaccagtaacgcgcggcagaatctttggtcagtccgcgcatattcaggtaacgggttttcaacaagtcggttccgacatggcccatatcatggcttaactggttcagatcatgcccggctttcatggagtaggatgcaaaagaatgtcttaaacaatcatgcggccagggattttccggagaatagccggcgcgggtgcggagggcaaacaggcgcgttttcagatcccgcggattgatgacgggatcatccgggcccgcgttgtgtggccggcacgccaggatccacgccttcagcacgggctgaatggtcacatggcgggcgccgccggtcttggaatgtttggcccggacggaaacaacgccgtcctccagggagatatccgcccatgtcagccgggtaagttcccagggacggatgccggcaaaggcccccagggcgacatacaaacgtaaatccgttgtgtcctgggccgccacgcgccgccgataaaccggcgccgtcctgtctatctcctggggcggcgagcatgcccggaacaaggcggtcaactgatccggggtcaatgccactatttccgcttcttgcacgggaagcttgtctatgggatccacgggatttttaatgatccagccgcgcttgatggcaaagttaaacagggtggcaagttcgcgcttcaggttgttccagctggtagggtggccggcgtggcatgtgtccagggcatcccggatcatggccggcgtaatggccgcgcatggtctggccaccagatccgggcaaagacgttccaggcgccccaggcgcgttttccgggacaggaccgtcacgcggctgttgtgcgctttagccgtgctggccgtgctggcaagttcccggagggagggggacatatccgcgtccggcggcgccaccccgcgccccagttctactaatgttcccagctttgccaccgagcccgcccgcttcacaagcgccgcgtaatgggtggcggcctctaaaggcgtcacccctatttctgacagtatttcatcaaccgcgttccacttataagcatcaagatcgatcgtttttccgtttaccgttccaaaacgtttcaaattgcgtatctgttccgcaatatatccttcagcctcgccttttgtggcgaaatattttgaagtctgtttgcccgtgtgggatatgcgctcagggatgacaacccgccacggttttccagggcgggaagtgcaggggcgcggcttccaatcgtcaaccaagctgtgcataattgtgcatgcttttttgactacattataccctttttcactgttttccagcatggaatgtaaactatgctctaaaagtaacaagccccttaaaccgttggatttaaggggctttaaagatggtagcagggaggtgatttgaacacccgaccaaaggcttatgagtcctctgctctaccactgagctaccctgccgttaagtggttgatgccgtaaggcggggaaatatttaacccggatcggaaagaatgtccagatttttttatggatcaggagcattttatcacggcaacccgccttcccctccagggaaatcattacggatgaagcatttttcattcaaccgtttcatacagcctgtgtcccatgccgtttcctgcatgcgggcatttacggcacaggacattatgatgccttctgtcccatgccattgccgcagcaggacaggaaatagaggcccataaagattttcggatccaccacttttccctgtcccatctgctccatcagccagtcatgcacctgaggaagaggaatgcggtgcacagtaatattttcgtgggccacaccgcctcctgccgatattcgatgcaggtcttccgccagatagaaggataccatttccgtagtcaatcctggggaagaaggccccgcaaaaagatacgtccaggagtccgcccggtatccggtttcctcttcaagttcacgccgggcggattgcagcgtgctttcctccccttcatccccggaaatgcccgcaggcagccctacggtccgggcatgcaggggaacgcggtattcttccaccagcaacagttctccttctttcgtcacggccacgatcatgacagctccgctggcattaacccggcgcacgtattcccacctcccctctttcagaagttccagaaatttcccccggcagagagacaggcatgcttcccctggctgttccatttgttccatgatgcagccacgttaggtttccggacggccgttgtcaaccatgcggaccgcctccctcctgcatcttcccggacagttccgttccggtccctgtaagtggttgatttccggcggcgtaatcatgcacttttcgtcacccaggccagtaacaaaacaacaacacattgatgatgagtaattaacaatgtcatacagaaaatatactcaggaggactaaattatcggaggaagcaagaacaaaatattttttcatgtggaacccccgtggaacgtagagccgcagaacgatgactcgcgctgtttcaaaaagatattttttcctcagacgcaaatcagtaatttggcgctcccgtcaaccggggtgttgagctgaaagcggatgagttcgccttctccaccccgatggacgccacgagctgtcacggctgcggatgaacctgatccggttccatccgcgggcggcctcgtagcgggacggaacgccttacggctatttctaaccagcaacatcttttatttccaataacaatgacgccgccatcagaactgtcagccacctgatccaaaatcacgggagccttgcaaacaatcatgtccccggaggtttatggattgtggtttcccaagttttccctgctggaggattcagggaaggcgctgacgctggtatgcgacgatcctatggccgccctctgggtggaaaacagctatacgccagagctgaagcaggccgccatgctggctctgggcacggaacgccagatcaagttcgtctgcacggatgaagtggcttccatgcccgctgcagaaggccagccgcaaaaagcttcttcccgggccaaaacgccgcaggcggcggattccccggccgcaccggtcaaaaaacagcgtacaccggccgccagggcatgcctgaatgacttatatacgttcgattcgttcgtggtgtatgaggacagccgttttgcgtaccaggccggactgtccgtcgcccagtcggaacgggccctgttcaatccacttttcctgtacgggaaatccggcgttggcaaaacccatctgctccaggccattggccatgaggtgctccatcaggattcatccacaaatgtggtgtacgtcacgggcgaacagttcgccaatgaatttattgacgcttcccgaacccagaacggacaaagcttcaccaaactgcgccgcaagtaccgcaaggcagacgtcctgctggtggacgacgtgcaatttatctccggcaaggaaaaaacggtggaagaattcctgcatacgtttgacgaactgttccatgcccacaaaaccatcgtgatttgcgcggatgccgccgcatgcgatatttccaatctggaaccccggctggcggcgcgcctggaatcaggccttacggtagaattgaaccttccagacgacaatgcacggctggagatcctgcgtagcaagcgcgaccgggccggcatgaacgtatccgacgaaattctggagtttctggcaagccgcatccagaagagcgtgcgccggctggaaggagcactgctccgtgtagccacctttacttccctgtcaggagacatgcctgacatcgccaaaattgagcagcttttacgtgacatcctgcgggaagaaacaagccgcatcctgaccgtggattccatccagaagcgcgtggcggatttttacgaactcaaggtcagcgacctgaccggcaagcgccgccccaacagcatcgcctttccgcgccagatcgccatgtacttgagccgccgtctgacggaacgctccctgaaagatatcggccaggcgttcggcggccgggatcacggcaccgtcatccatgcgaacaagctggtcgcctcccgtatggaagaggatgtgcgcgtgagggatatcgtccagaggctggaagaggagttgagggattgattttccttccctccagccctgctggaaaagcatggtcccgttgaatgcccctggcttttcaagcggaagaagcgcttccgcggcgcaggggagaataagcttgaggcgaaagcggtttggattagaatcaccctgttcccattgattccatgatccacgccgaccagctttccaaagagtttggccgctttcaagcggtaaagaatgcctccttccagattgaaaagggggaaatcgtagggttcctggggccgaacggcgcaggcaagaccacgactttgcgcatgctgaccggctatctgccccccacttccggcacagccacgattgccgggttcgacattgtgaaaaatcccctggaggctcgcaaacatctgggctacctgccggaacacgtgcccctttacgacgaccagcgcgtcacggaatacctgaaattccgcgccaggcttaaaggcatctcttccaggcagatctggcctgccgtctccaaggttgtagagcaatgcggcctggatcccgtgcgccgcaagatgatccgcaccctttccaaaggctaccgccagcgcgtaggcctggcggacgccctgctgggggaaccggacctgctgatccttgacgaacctaccaacggtcttgaccccaaccagatacgccagatacgcgaactgatcaaaggtctggcggccaaccataccattattctttccacccacattctcagtgaggtggaaatgatttgcaacaaggtcatcatcattgaccagggaactatcaaggcagcggataccccctccaacctgacggccaatctacgggcagccggcaagattactctggaattccggggagacctggccctgattacgcggaaactggaaaacctggaacatgtgaagaaggtcatccatgaaggaacggacgccgacggctggcatacgctgaccgtacgcgcggaggccgggacggatacccgtgaaaaggctgcgcgcctccttgcggaacagggctgccccctgcgccatatttaccgccacacccccacgctggaagaagtgttcgtggaaatgacccgtaaagattaacccccccttttttccatccccgcctatccaccaccgcccatttcccttttctccccatgtctccagtacttaccattttcagaaaagaactcagaagctacgtaatgactccgtacggatgggttatcctggctttcgtcatggcccttcagagcgtctccctgtccggcacgctgaaggcttttcaactggccccgcagaaggaaggcatcctgttcttcatcctgcattctcccatgttctggttttacttcctgttcatcttccctctgctcaccatgcgttccctggcggaggaggaaaagacgggaacgctggaatccctgctcaccacgcccatcaagacatggcaggtggttctgggaaaatatttctccgcatacgccttttacatcatcctgtggctgcccatgcttctctatcccatcctggcggactggtccaacctgattgtgcagtggatttacggatatgacgcgggcatggttctgccttaccgcctggcggactgggccggggcatacgccattctgctgctggtcggcgcctggttcacggccatcggcattttcgcctcctccatgacgggcagccagattatttccggcatcatcaccatcggcctgctggtcctgattttcttcatgggtctgattcccgtggtgtggggggaattccccgcagcggggattttccactacatgtcctgctcggaacatctggaccgcttttccgccgggctggttgacacgcgccccgtcgtgttttacctgaccatgacagtcctgacgctggccgtcaccatccgcatcattgaccaccgccgctggaaacactgactcatccctccttcaccacttttcatttttacctatgagcgaaacaccagacacccccgccgcggctacggaagcctcccatcccgccgcccgcaaggtcaaacgcccctggatgacctggatcaagcttttcctgctgttccttatcgtcgtatgcctgaattacgtaggctgccacgagtattaccgccgggacctgacggaagaccagcgttatgaaatttcccgtcagagcatcaacatgctccagtccccggaaatccagaagcgcaaaacccccgtcaaaatcacgttcgctttcctgcgcaccacgcagaactacacccgcatgcgttctctgcttgaggagtacgaacgttattccaacggcaaggtgaaggtggagtatgtggatcccctccgccagccgaacaaggcccgtgaaatctccaatatctacggaattgaattcaagaagaacctggtcatcattgatgcccgggaagatacggaaaaagcgctcaaaacgtttgaaggaacccaggcggacgccgcccacgtgcgcatcctgcccggagacgccttcgtagtgtacgcacccgggccggacggcaaaagcatgaaggcggtggcgctccagattgaagacatgatgactgccggcatttacggagcggccaacggcgaacctcgtaaaatttatatcgcggcggataagagcaacttcaacgagtccctgagcaacaaccaggaagaaagcattttcacgacgctgggcaaaatctgccgttccgtcaacctgcagcttgttcccatccgcatgagcggtctggaagaaattccggaagacgccgcaggattcatgattatcggttccaaatatgatctgtccccgcaggaggcggaagtgctccagcggtactgggcgcgcccgaacgccgccattctgatcatgctggaaccccagaatgacacacccaaacagctttaccgctttctccgcgaacaggggctacggccccagaatgaccgcgtgatgctccgcaacaggggcaaccgttccgtttttgaaattaactccattttcgccccctccctgaattgcacccgtgaattctgaaattccagcaccggactggaaggggagagcatctccctcattctggattccgacaatgcggccatggaacagaagcgcattacgccataccccctcctggtcacaacggaggattattacggagaaaccaaatacaaccagttccctgcccagttcgacgcaagggaagataatccgggccctctgatgatcggcgcggccctcatccgggggaatgccggggacgtgaaccagaacaagactaccgggcgcctggttctgcttggcaatacggacctgctccagccccggcaaatcaaaccagaacagagggatttcatgcgtacgctgatcggctggatgacggatcgtgaagaattgcgcggcctcggctcccgccatgacctgaccgtcaagctgaatctggaccgcaacgccctgggcgttttggaactcctgacgaatatcggactccccctgctggcgctgctgatcgccctgattatctggaacacgcgccgtcattaactccacccacgcccattaccggaagcacatgcgcacattccgttttattcttctcatcctcatcaccctcgcttctgtcggagcagcggtgctccttatgattgacggcaatctgtcccgcatcatcgggcgcaccgctttcagttccggagaacggcttttcccgtacacccgggaagaaatgaacgaggtttcctggatgcgcatcaattgcgtgggagatgtcgcgggattccgccgcaaacccaacggcgtctggtggtgcgaaaagccctggaacgaccgtatggatcctcgcgcggcggcggccattctccagtacacgtactccaccagcatcgtggacgcattgcccctgcacaagattgattccgcatccctgaaggaattcggcgtgaaaaccactcccgttaccatcactctcaaggaaatgagcgacgacggaaagcgttcctccactgtggcgcgctatacgctgggttccccagcgccctggctggtggacgatccggagaacaagaccacggatgacaccacctatatgcagacggatttttacggccgggacacccgcattctggtgggcaccggcaacatcctccctctgttcaaatccggcatccgccagcttcgggactaccgtcccctgctcctgcatccggccatgcccgcctccattgaaatcaacaaccggggccagcgcatcgccttggagcgcaagactcctggctctccctggaaaatcacgtatcccctctccctggatacggacccggccatgatggatgtgctgctgggcacgctccagaagctgaccgccgtgcgcgtgtacaacccggaggaaacgagcgtgccggatatgacggatgatcaaatcacctccgtctccatcaggaatttcacaggcagcctttcaggggacggcaaatccctgcaaatggaggaacagcccgtcacgctccggatttatcctccctcggacaacggaagcctgtccgaactggtcaaggccaccgtttccgaccgtaaggccgtctttgaattggcgcaaacgacggaaaccaacaaggaagttcccggcgtacgcaatattccgctggatctgggccttctgcgttccaagcaattgacggacatcggggattacaagattaccggcctttccatccgtaaaagttttcaggattatcctaccatcgcccgcttcattcagggggatgagaaaaaaggcatcaagcccacctggctgtacacggcagagggcgcccgttaccaggaagctaatccggagcatctcatttccctgctgaaaaccgttaaacagggaaaagtggccggcttcgcttcggacaaagttacggacctttccgtgtacgggctggataatcccagaatgacgctcaccatgtcccttctgcccaagcccggtgaagagccacgcccccctgtgacggtgtttttctccaagggtgcggacggttcctggtatgcccgccaggccggaaaacccaccgtcgccatactggacaacgcctacatgaaggatttgctgacggatgcactggcctggaaaaaaaagaggcttttttccttcagcaggtttgacctcagagaaatgcacctggaacgcatcggttccggaggccccctggttctgaaattcgaccgtctggacgattcttggacagcctccaaagacgggaaggatgaaaccttgaatatcaacccgaaccgcgccaaccgctatctggatgaactggaaaaaatggaggtgagcacctggctcccctatacggacgccacagcgcatgaagccctgaaaaatcccgttttccgcctgaaactcatcctccagtcttacaaggaggcggcccccgtgcaggcccaatccggttccagcgacattacctttgccccggaaccggaaacggaggacaaagtcatcacgctggaaatcgccccggcgggagaggccggatacagcagattttattacggcagagtaaatacaaccccgaattattttatcctgaacatggacgccgtacgtctgctcggcgccagcctttcggaagacaactaatcactcctcccgcatgagcaagattgagctgcacaccgccatctcctttctggacggaatcctctccgtgaattccattccggacgccccccgcgccctgaacggccttcaactggaaaacgggggcaccgtttccaaggtggccgccgccgtggacggctcagaaaaggccatccatgcggccttggaaacaggtgcggacctgctccttcttcaccacggcattttctggcagcccatgcagcccattaccggcatcgcctaccggaagctgaaagccgccatggacgggaacctggcgatttacgccgcccaccttcctctggacgtccaccccgcatacggcaacaatgccctgctggcgaaggcctgcggcctccggtcatgttcccatgatgggctggactaccacggcgtttccctcggtacgcacggagaatttccaggtacatgcgcggaattggagcaaaaactggaaaccgtcctcggcgcgcccgtgcaggccttctggaaagattccccggaggctccggccggagatgtcttcatctgtaccggaggcgcgggagacgatcttgcccaggcagcggccctcggctgccgcacctacgtgaccggggaaggctcccactggaacatccccctggcccaggaactgggcgtcaatctggtcttcggcggccattactttacggagacgttcggcgtaaaggccctggggcttcttctcaaggatgtttacgggctggattatacctttattgacctgcctccctccgcctacagccattgaccaaacgccacagaacatgaatctgactacggacgacgccgacgggaaaatccgcctggatcaataccttgccgcccaccttccggagctttcccgctccaggatccagagcctgatcaaaagcggggacgtgttggtcaacggctctcccgccaagcctaaaaaccccgtctcccgcggtgattccatcaccgtccgcattccggaaccggaaccggcggaagcccagcctcaggatatccccctggacatcctgtatgaagatgaagacgtggtagtcatcaacaaggaaagcggcatggtcgtgcatcccgcggccggcaacccggacggcaccatcgtaaacgccctgctccaccactgcggggacctctccggcatcggcggagtggaacgcccgggcatcgtccaccgcctggacaaggacacctccggctgcctggtcatcgcaaaaaatgacggcgcccaccagtccctgacggcgcagttcgcggcccgaagcacggaaaagcgttatctggccgtcgtccagggtattccttcccaaagttccggcacggtcttcacccatatcggccgccatcccgtcaatcgcctgaaaatggcagtagtcaatcccggttccgggaaagccgccattacggactacgatttgctctgcgcagacccgtccacggactcctccctggttctgtgcacgctgcacacgggcagaacccaccagatacgcgtgcacatgctccatctgggccatccgctcatcggggatcccatttacgccaaacccgcccggcaaaaggcaaaacccggcaggctcatgctccacgcgtggcggctgggcttcgaccacccgcgcacgggaaagcgcatggatttcgaagcgcccgtcccgccggaatacacgccgtggctccagctcttccccaacgggctttacggggccatcccggagccgcgcccggtacaggaagacggaggacggaactaaacctccccgccatttcccggcagcggaagccgcttcaacggacagaatacgggaaagcgccatattcaaatcccagagccggcccggccttcgtcagcaatccgccgtcatccggcgcccccatccttgcggacaaagatgcggcaacagacccgccgttcaccttcttacgccccctttccggcaagagcgtccacggtcacagtcagccgggaacaatattcttttcatcaatcaaggagaaatgaacctgcccggcatcttccgcgcatgcaagaagaatccgcggcggagacctcccctttaatcttgatttgcccccccggaaccgctaccctgacacggctttaaccacacagctttcacagagacatggagaccacgcaccacggggaggacgcctctccggacaatccccccaggcagcaaaaaagcggaaacacggatgaacagaccatcgccctgacaaaggcgcgtctggccattgacgaggtggacgcccggattgtagagctgttaaaaaaacgcgccgaatgggtgcatgaagtcggccgcattaaaaaggaaaaaaattcccccatcttcgttcccgaacgggaaacggccctgctcaacaaattgaaccgcctgaatgcgggcgtgctgccggaagcctccctccaggctatttaccgtgaaatcatttcctgctccttctttctggaaggcggcctgaccattgcctacctgggccccaaaggaacctggagccaccaggcagccctcaagcagttcggaaaaagttgcgaactcattccgtgccagagcttcaaggacgtatttgacatggtggatcgggggaaggcccagtacggcgtagttcccgtggaaaactcttcggaaggttccgtcaccgccgtgatggatcttttcgtcacctctcccctcaaaatctgcgcccaaatcaatctgaacatccgcaacagcctgatggcggatattccgcgggaacacatccgcatcctgtattcccacccccaggttctcggccagacgcggaactggatccagcggcatttcccaaacgcggaactcgtggaaacgtcctccaccacgaaagccagcattcttgccaaggagaacgccgccatgggcgcggcatccctcggctgtccgctggccgcggaattgtttggcctgaacatcctggaagaagacgtgcaggaccagtcctgcaacaccacccgttttgccgtcatcggacgccaggaaacgcagcccagcggcagggaccgcacctccctgctcatccgcatccagcataaacccggcaccctggcggaagtagtcaactgcttccagcggcacaacaataacctgatacgcattgaatcccgcccgtccaaagtcatcaactgggaatacgtcttttacatagatgccgccggccacattcaggaatcccccttacgggaaacccttccggagctggagcagcactgctccatgctgaagattctgggcagctacgcggatacggacgtcatttaagcaggttcagccttcccccccagcctcacaccattctgaacaaccatgaacatagccacgattgccgccctggccgtcactctgggacttcccgccccggcccagcagtccgccactaaaatcattacggaaaacggacagcctgcgctggccctggacgaacagttcgcagcccggctgcgcgacggcggaatgaagcagggttccccggccaccgttcccgcggaattttcggcagcagcgcccggcctccccctccctgcggatgccaaccatgccgctgtcagggaaacggcgggggaacgcaaccggcgcatggaatggtggagggatgccaaattcggcatgttcatccattacggcctgtattccggattggccggggaatggaaaggcaggcccggaggttccgaatggattcaaaaaaacgtggaagtggatacggatacctacgccgcggaagctctgcccctgttcaagcccagggaaggcctgacggaagaatgggcccagctcgcccgggatgcgggctgccaatatgtagtgctcaccagcaagcaccatgaaggcttcggcctgttcgacagcgccttgacggattacgacgccaaaagcgccgtgaaccgggatatcatccgcgaatatgtggactcctgccgcaagcgcggcctgaaagtgggcctctaccactccgtcattgactggcatcacccgtcctatgacaacaccatctgcccggacctctgctaccctgcgggacaggcggcaatgcttaacaggaaaaacattccccgcgaccacgccgcctaccagaaatacctgcacgcccaggtccgggagctgatgacccgttacgcgcccatcgacatcatgtggtgggattactcccagggagccatggagggagccaaaggctggaaggcgccggaactgatggacatggtgcgctccatcaatcccggcgtcatcatgaacaaccgcctgtacgcttattccggcctgaacaaaaaccaggccggcacgctggatctgcgctgcggggactatattaccccggaacgcttcatcccccggcgcggatatcccggcgtggactgggaatcctgcatgacggtaagcgacaaatggggctacaaccgctacgacaccaacatcaaatctccggaaaccatcattgaaaaactggtggaatgcgttaccaagggaggcaatcttctgctgaacgtcaatcccatggcggacggcaccattccggaaaaagtggccgccaccatgcgcggcgtaggccgatggctcaacatcaacggtgaagccgtgtacggaacacgggcattcatgcagctgaaccagcctgccaccatcaatcggcagggggatatcttcgtcttcctgattcccccgccggacaaggggccggcccagccgcccagtgaaggaaccatgaaagaattgacggcgggagcggaacacgcccgcatgcagccgctggatgccaccggctacgaaaatgacgggggaacagccgtcaccctgcccgccggctattccaaagcattgcttctgggggacaacaccgcccttcccgtcgtcaacggaacgatcctgttcaaggctcatgaacattccaaaactccctgttccgtcatcaaactgagcaaatagccattttccccactcatttttcctatggaggaagaccttttttccctggcagccggcaaacagccttcacagcaggctacaaatgaaacggcaccccgggccggggaggcgcgggaaaacgccagcaccgaccaacccggaaacgcggaggcccccgctcaccgccgcatagactatttgcgttccgaactgcgccgccacaaccgtctgtattacgaacaggcggaaccggagatttccgacgcggaatatgacgccctgttcctggagctggaaaaattggaaaaagcccatcccgaactgtcggatccggactcccccacacgccgcgtaggcggcgcccccctccagggcttcaaccagatcagacatgcggtgcccatgttgtctattgacgacatttttgagcagcgggacgcccccgtaccggatgaagaactggcgggattctaccataagttgtccagggcgctgcaaacggagaacgtgcccgtctccgtggaacccaaaattgacggagtggccctttccatcatgtaccgcaacgggaagctggcttatgcggccacgcgcggagacggagacgtgggggacgacgtaacggccaacgtccgcaccatccgcagcgtccccctcacccttccccccggcgcgccgcccgtgctggaagtgcgcggggaagtcttcatgcccaatgaagcctttgccaaactgaacgaagaacgggacgccgacgggctccccgcattcgccaacccgcgcaacgccaccgccggaaccctcaagcagctggatccccggcaggtggccgcccggccgctggccttcctggcccacggattgggcgcgtatgaaggcccggaactcagggacgcaaaagacttctggaacatgctccgccattgcggcatcccctgcaatgagccggtgtattacacggacagcctggaatccacccgccaggccgtgcgggatattgacaggctccgccatacgctcccctacggcacggacggagccgttattaaaatcagctccacggctacgcgggaagcgctgggagctacggctcgcgcgccccgctgggcggcggcgtataaattccccccggaacagaaggaaaccaccctgctgaatattgtcgtgcaggtaggacgcaccggggtgctgacacctgtggcggaattgcagcctgtgctgctgtccggttctacggtagcgcgggccaccctccacaaccaggatgaaatcgaccggaaggacgttcgcataggcgatacggtgctggtggaaaaggcgggggaaatcatcccggccgttctgaaagtgaacctttccaaacgcccgcaggacgccaggccctacagcatcctggaagccacgaaagggctgtgccccgcctgcggcaaccccatcatgaaggaagaagggaaagtagcctggcgctgcaccaacttcacctgccccgcgcaggccgtcacgggcatcacccatttctgttcccggtccgctctggatgtggaaagcatcggctcttccgtggcggaagcgctgagaagctccggattggcgtcctccgcgctggaccttttctccctgatgccggaccaactcgccaacctgaacctgggcacgccggaagaaccgcgccgttacggggagaagaatgcccggaaagctctggacgccctgcaaaacgcgcgcgggcttcctctggagcgctggctcatcgccttcggcattcccctggtgggggaagttgtcgccaaggcgctggcggacacgcatcccgacctgaagcatgtggcggattcgccctacctccgggacatcgtccgcctggatgaactggtggaacaggccgccaaaaccaaccccaacacccgcgaaaacaaaaaggcggtgaaggaaggcgcgctttccgcagaggcggtacaggagcgccaccaggaactgatggaggaaatcgaccgcctgaccgctccctatctggcaacgggctacctgcgtaaaaacacggccaaattcagctatggctctgaaatcggcgtggcggcggccaaatccctccggagctttttcgcctccgcagcagggaaccataccatggatgtcctgcacggactgggcatcaatccccaatcccaatcttaccgggccagccttctcgaaatcccggcgggctccctgtccggcaaaaccttcgtcatcacaggaacgctcagccatccgcgggattactttgaacagcttatcgcctcccacgggggaaaagccaccggagccatctccaaatccacctcctgcctcctggcaggcagcggaggaggctccaagcgggacaaggccctcaaactgggcgtgcccgtcatttccgaggaagacttctacaaaatgatcgggaattaattgccgcaaaacagcggaaacgggaagcaggaactgaaacgcacgcatcatgcgcccggctgcccgtatcttcgtattcccttcgcttttttccgtgcgccgttttccggaaatttcattcctgaatccagcaaaaaagcttgctacgggcagccatctgtcccctaataaaccggtatgctgaacctgcccaatgccattaccctgacgcgtattgccctggtagtcgtctttacggcagcagtcagcgtcgcggaccggtattcctggggatacctggccgcgctggtcacgttcattctggctgcctgcacggactggctggacggctacctggcccgccgcctgaatcaggtcaccaccttcggcaagctgattgaccccctggcggataaaatagccgtctccgccgccttcatttacctgacgggcgaagggctctgccccgcctggattaccattctcatcatcagcagggaattcctggtcaccggactgcgccagattgcgcaggatcatggcgtcatcatccctgcgggaacgtccggcaaatggaaaaccgccttccagctggccttctgcatcgcctgcctgctggccctgacatggacgcatacgccggaatacctgccttccatcacggatcggctggccgcgctctgcctgtggcacggttccggcgcttccaacttgctgtaccaggttacactgtggggttccgtcatcctgaccgtttattccggagccgtttactgcgcgggcgcccgcaaattcctgcagcgttgaaaattgccttttcccccatccgtccggagacagaggcaacattgttcattctccgggacatttcatataccgggagcatgatttcattccgccgggttcctgtatgaaagaatgcatgcggaatcttccgctgtcgcccttcctacacatgctgaagccttggaacgttcaagctgtccatcctctcttccggaagatgaacgcctccacggctctcaagccgccttacctgtccttgacattgcgttccgcaaaaacatttaaaggatcatcatgtttgcccgaaggtttggcattaatataatgccccctcttttccacgccatcccacagcgtttccaaatccataagaaagccgttcctatcgtatctccccaaagcaacagctatgctgtatactgaattaaaaacaagcctgtcattatttctcggataagcaaaaacatctttagaccccctgtttttgggaactgtggcaaaaaacaggaatgagccttcttcggaatttctgattgttatttttccattttcatcaaccaaaatttttaaagtatagaaaattcctttcttcgtatcgtgagcacataaatgcagccattcctctctattcattctgtctatgacgaacctgccgtcatcagatgaattcacgcaagcttccaaccggtacaaataatcgttgctgtcttccgtataccaagctttatagttttcagcattgcgctttttcttattaatcagaataccgaattccaccatcttttccttattttttgcatacagagtatcttgctgtttaagtcggataagatctccttctatgacaaaatttattttctgatccacccattcccaacgaggttcattaccataggaaggagtaaataaatgttttcccgtaaaaagatttacgcgctcagaaattcgttttttcctaccgtgaacgctttttaaatatttcatattgaacaaaccatcttccttaataaaatctttcggatacccgaattcatgttttttcatttcttcataaagagcatcaatcagattctggtaatattccacaccttcttccccatcaaggcgtttttgtttcgcttcagcaagaaatccgacaaatggatgctccttgccattcctgccggaatccggaaagccagcttccccgctccgtttttcctcccgcgtcagatgctccaataaccgctgatcagctgctgaaagtttttccagtaaaatggtttttatttttccaccatttgcaagcaaccggattttgttgcaatctcttccctcatacgctgcctttaattgatggcctgtcaccgccgtccaaatccggggtttactcaaatccatcccctcttccggctgaagccccgcaaaaagagggctgccgcaacatacggacaacacgacaagaaaaatgccaattccattctttacctttgttttaagggacataactaattcaacatcgtctattcaaaggaaagtatacggatgaggaatccgctgattgggacatgcggcctctaacatgtcagccggctccctgatgcagataaaacctgtaccggaacaggaaaagagcctcttgggtattccccccctaaattgtccgccagaaattactcagtcattcatattcagaatttagggttgacggcggattcctcacccgcttcatccggtaatttattcatattcaatttctataaaaaaatcatgacaagaactgtttttgaagcggagatacggaacactaacaggacaaacgtttttattttccttgacaggagattttcgccgtgttttgataagttcgttcccgctgaatggtgtttggttgttgattgttgatagtcatttgcggttggcggaatacgggcgtctccgtattgatcttttcagtatcgctcctgcgggcttttttgttccgttattgccgtgattccgtcagttcattgcagccgaggcgcattcacagacacatccacagacatggtatcaactacattcagggagcttggcttgtcggctcccattctccgccaactggagaatctggagtacaagacccccactcccatccaggcagcctgcatccccctgttgctgcagaacaaggacctgatggggctggcgcaaaccggaaccggaaaaacggccgcgttcgccctgccccttattcaacagctttcagaacgttccggaaagccgccgggccgccgggtaagggcgcttattctgagtcccacccgggaactggctgcgcaaattcatgaaaatatccgcgcctacgccagagggctgcatctgtccaccgccgtcatcttcggaggcgtggggtatgcttcccagttcagggaactggccggaggcctggatattctggtagccacgcccggcagactgatcgaccatctggaacgccggaccgtcagtctggacggcgtggaaaccctgattctggatgaggcggaccatatgctggatatgggattcgccccggccctgaaaaaaatcgtctccaaaatcccgaggaaacgccacacgcagatgttttccgccaccatgccggacaatatccggcaactggcccagaccctgcttcagaaaccggaaacggtgagagtctcccctccctcctccacggcggacagggtagaacagttcctttgcatggtcggctcccagtcggaaaaaaggctccttaccctggaactgctgaaacagcaggagctccctggccgcacgcttatctttacccggatcaggcatggagcagaccgcctggcctccttcctgtccggaaaggattatccggcttccgccattcacggggacaaaagccagggcaggcgcgaacgcatgctccgtgaattccgttccggggaaacgcctgtcctcgtcgccacggacatcgccgcccgcggcattgacgtaaaagacgtacggcttgtcatcaactatgatttgccggaagaaccggaggtctatgtgcaccgcatcggccgcacggcgcgtgccggagccgccggacaagccatcgctctctgttccccggaggaaatcaggaaagccaggaacgtgcacaagctgttggaacgcctccttcccgtgcacgcttccagcgcctccgtcccggctgaattgcgcgcggtcccagaagcgcgcaggaaaagtagcagctccatgcaggaaaaacgttccgctccccgcaggaagccgcggaaagggtacggaaggaacggcagccgtgcggaagcatgattttaatcattcaaaaaacttttgaacggaattgaagtcaacgcggtctcacttgctgcaaacggttctcctaatcgttccagtcgggaagcttcaaccggagtttcaatcatgaaaataacctcgttcatcatcaggacactatgcgcgggcaccgtcggttccctcgcctgccaggccgccatgcaggcttacgcggatgacgttccctccactttcgtggaaggaaattattccccggaagtagcccgctacgtgcagagcatcgcaggcgtggcgctggcctcgggcattcatgattatgacgaaaacgccaccagcagttatcaggttttggctcaggtccttaacagcggcaatgtaacggaattgccggaagatctgaaacgagccattggaatgctgatcggctacgtccccgacccgaatgaaatcatccagccgatcatgtccagaaaacagattgagaggatgaaaaagatggcggaccgcatcaagaacctgatggaggaaaaatacggagtgaacctggaagactgcacgaacatcatgaagcgcactctggccccgtccatcccggacatcctccgctcctgcggcatggaaggcacccagctgcccgccaccaccgctttccgccccaggctgggcaaggctctgaatgaagcctatgccaggcttgcggcgccaaaacttcccgccgccggcatgacgcaataaccggaccatctacggatgatcggggagatgatcccgattccacggcacgcggccccctgccagggtcccctgaatagaagccgcaggaaacggaatgatcttccccgtcgccgggaacggaaacggcagccaagcgccggcggcaacaaacaacaccctccggatgtcctccgatgcagggccgatccttcggaacgcggagcggcgatacgctcgctcccctgttttattcccaagcaacggcatgcaacatcggcacaaccggatgatgcccttacaggccccgtccttcccgcgctgcggcaggactggggcttttttcatgtccgggattttcaaaagacggcggcattccctcctgattccttctaggaatcagggatattccgtttttacagaggaatgcatttttttcaccatctgtgaaagaaagattctcaaacctcagtatctatggcaaactagggattcaaatcctttatataattaccatccatggataattcatcatcacgccgtcgtttccttcagaccctgggcctggccactggcgccctggctgccggttcctttgccaacgcccaggaagtagcccccctggctcccaagaaaatcaccattccggacccgaataatatcggccccatgaccacgtggcccccgcgcaagcccggcgccatctacatgggcggcttcagggctcccaagctggacaaggtgcgtgtggcctttgtcggcgtgggtgaacgcggttccatgcacgtgggccagatggccgttatagaaggtgcggaaattgtcggcatttgcgacctgtatgaagactgggccaagcgcagtgcggacgtcgtggaaaagaagacgggcaagcgcccccccattttcacgaaaggaccggaagactacaagcgcatgatgaaggaagtcaagccggacgccgtcatcgtctgccccagctgggaatggcactgccgtgttacctgcgacgtgatgaagatgggcgcccacgcctttgtggaagtgcctatggccgtctccatcaaggaactctgggaaatcgtggatacctccgaagaaaccaggaagcactgcatgatgatggaaaacgtcaactacggacgtgaggaactcatgtacctgaacatggtgcgccagggcgtcattggcgacctgctgtacggagaagccgcctacatccatgaactgcgcggacagatgaagcaggtggaacgcggtaccggttcctggagaacctatcactacgccaagcgcaacggcaacgtgtatcccacgcacggcctcggccccattgcccagtacatgaatctggcccgcaaggacgactgcttcggcaggctcgtctccttctccagcccggccctgggccgcgccgcgtatgccaagaaaaatttcccggcgaaccacaagtggaacaagctggactttgcctgcggcgatatgaatacctccatcatcaagaccaccatgggccgcactgtcctggtggaatgggatgaaaccagtccgcgcccctactcccgcctgaatctcatccagggcaccctgggcaccctggccggcttcccgacccgcgtagccggggaaaagctgggcaacggaaattatcatgaatggattgaaggcaaagaaaaactggcccccatttttgaaaagtacgatcacccgctctggaagagaatcgggccgctggccctgaagatgggcggtcacggcggcatggacttcgtgatgctcttccgcatcatcgaatgcctccgcaatggcgaaccgatggaccagaacgtttatgaaggagccttctggtcctccgtctccgagctttccgaatactccgtggcccagggcggcatgccccaggtgttcccggacttcacccgcggagactggaaaacgactgctccgctgggcatcgtccagtaacagccggcaatcttccccggcccgaagcttttacgcctccatggcgtgtttccgggccggggcaaaatgcctcctcttccaaaaacaggcccagcttgcaggcggcctgttttttattgctccaatgacaccctattccggaagttgaaagacgctgcaggcgctccacttgcccgacaaggctcccggatgacgccaaaaagcggaactccatgaaattttccttctgcgcggaaccgtatttaggcaagaaaaacatcctgcagaaaaacgccgttccccttacatcgcacacgccttcatgctttcctattgtaccaatattcatcccgcagaatcctgggcggaaaccagggaggctcttttcacctgcgttccccgcatcaggcaggaactcgcgacgatggactcccctctgaaggctctccccctgggcatcggcctgcgcctgtccgccagggcggcagcagagcttctagcaacgccgcacgccgcggaaaccctgaaatcatggctggaagaccagggcgcgcgcgtagaaacccttaacgggttcccttacggaaatttccacgggcagcgcgtgaaagaacgcgttttccagccggactggactacaccggaacgttttgaatacacctgcaacctgttccgcattctggcactcattggtgacgaacaggctgacaggctgaccgtcagcacgctccctgcctcgcacagctggtttcatgcggatgaagaacgcctcttctcccggctggacgccatgagcggattcctggatgtgctgggcaggcagaccggccacctgatgcagctggggctggaaccggaaccattcggccattttcacgatacggatggagccatccgttttttcaacggcctccgcaaccgttcccgccgtcccgaacttatcgaacgccacctggggctgacatacgatacctgccatttcgccattctccgggaagaaccggaattcaccctctccgcctgggaggaaaacaacatcgccctctgcaaagtgcaattttccaacgccctggaatgccgcatatgcggggaggaagacctggaacgcctccggcagtttgacgatggcgtttatttccatcagaccagcatcctccaccgggaaggcgccatgcttttcccggacctgcccaatgccctggcctatgggcgggattatgcagaggaaatacgtgattcccaatggcgcattcattaccacattcccctgtacgcttcaccggaaccacccttgaaaagcacggaagaattcatcctgaaaacgcataatttcctccggggccgcaaaggcccgcaaccgcacctggaggtggaaacctatacctggagcgtcctgccggactacatgaagatccccctggcagcccagattgcccgtgaactgcattatattgaaaccctgtaaagccatgatgccccgcatgcatccctccgccgtcctgtcttccggattcctgctgctgtccaccggtctttcctcctgcacatttcttcccatgttttcctccggagggcaggaaacgccgcggaccctgggcgcacgcatggaaaaacacacggaagtcctgcaaaaagacatcggggaaagaaacgccagccagcccaaatccatggacgccgccgccaaatacatcgccgggaatttctcggacatggggtacgccgtcaccatgcagcccgtatccggaggaaacgtgaaaaaaggagcggccatttacaacatcctggtttacaagcccggcctgtattccaacaatcaaagcatcgtcgtgggagccaattatgattccagcggacagcgcaacaacggcagcggaacggccctgctgctggagacggcgagaggcctgaaagacatccccaccaatcacaatatctattttgtcgcatacgcgaacggagcgaagcccgcagggaaatccatctcttccggagcctgcgtgcatgccagcaccctaagcggcagcattggagcaaccaacatcctgggcatgatcaatctggaaccccagaagctggatgccggaggggaacgaaaacagccgggcccggaatcctcccgggaagccgttctgttcacgaccaccccgcacggcaagaaatttgctggccagtgcgccgcccccttcgccaaatcctgggagcaggcgcccactaccttccaccgggaaccttccgccctcacaggcaatgaccgccattacgcggtcctgggcattcccacggtctcctgccggagcaagtatcccgtcacggatgcccgtacggaagagtatgtgcaggcgctgacggacatgatccaccaggtagcggacaacgacgcgcccgaaccggcaaaaaacgccggccagggcgagaaagcatcctgacgtttccctctctccccgttaccgggacagctttctccttccgtggccgccgcccagcatcagcacaggcatgaaggaaagggccaccagcgcaataaccataggcatccaattgtcggaatacctctgcatcaggaacgaagtcagggaagggccggccagcgtgcccagggaataactcaacagcagaagctggttcatggtcaccagttcatcccgggaagcttcctcgcatccccaggccatggcaacagggtacagggaaaatccggccagccccagagcaatcagggagggagccatcagcccccccttcagcatcagcccggcacaggccgccgccaccagcagggactggcatttcatgacgaaagcgcggccgtacctgtccgccagccgccccatgggccactgccccagaatggcagcggcaatcagcagggccatccagtatcccacggaagagtggtgcattccctggtgcttcaggaacaggggcatcaggcaataaatagtacccaataccacgccggaaatcacacatcccacaacacccagaaagacgctgcggcgtctcagcagtgtccgaatttctatatgggaggaggatgaaacctgtccattgcccggctccagacgcgcgaacatcagcggaaccatgcccgccactgataaaatgcagacttccgtcacaatcaggggcatatcgctggggaaccagcccagaagcaactgccccagcaccgtacccagataataaaccaccatgtaggaagccagcagaatgccgcgggtttgcagcgttccggccctcagcagggcgctttccaccaccacccagaccagggcgcagctgatccccgccagcagccggaggccgctccaggccggcacgccgggaaacacaggcagcagaacggtggagactgcgcataaaaggcatgcatattggtaacttcctttgaacccggcccggcgaatcacgccgccagccagcagcgttccggccaggttcccgagaaaaaagaaagcccccaccagccctgcctcccaggtggcggcatcaaattgctccatccacaggggaacaaccgtattcaacacggcaaacgccactgtctggaaaagaagccccgccagcagcagggcaataggccaggtaaatgtacgcatcacgataaagcggggactatagcaccaaagccgcatcagtcaaccgcctcttccgtcggaaagaaaaacaaaaaaagcgcctcatcaacaaaagacacaacacattgattgttaaattattaataaacaattcaaaatataggggattgtcatattccccggcgcagggaagcgggcagtatcttcatctgctcccgatatttggccaccgtcctgcgggcgatgttcacccctttttcccgcagcgcggccgccaacccggcgtcactgaggggtttggtagaatcttcctccgcaatcagccgccgcatcagctcctggacggcgccggcagccacggctccggaagccgccccgtccggggaaacgccgccttcagacggaactcccgcactgaaaaaggatctcagctctttcatcccccacctgcacaacaggtacttgtcccggcacgcccgggaaaccgtggaaacatgaacccccatctcctccgccacttcttccatgcccaaggccttcaggcgggacagactggacctgaaaaaatcctcctgcctcctcacgatgacacgggccaggcgcaaaacggtctcctgcctcatatccaaagcccgcaacagctcctgtccctcccggaacgccctgcggagatattgcctcagctcccggcttccggaaccctcagccattaactccatataccgttcattcatggacaggcgcggaagatactcggaagtgaggataacctccagcacgccggaaggcccttcctccacaataacatcaggcagcagatgaggattgccgccgggggcgtaggccccccctggatcaggagtcaggctcctaatcacctccagagcctccgccacggcccccggttccacgtccagcaggcgtgcggcttcctcatacttgtgcgccgccagttcccgccagcagcgcttgaccaggcggaaagcaagcgaacgcttcaaaccgcgctgttcaagctggatcagcagggaatcccttaaatccgccgcccccactccgggcgggtccatttccctcagcgcagccagagcttcctccatgtcccgcatgctgaaacacccctgctcttccagctcctgcggagactccgtcagaaacccgcgttcgtccaaagcgtcaatcagcaggaacagggcgtcccgggcgcggcccgtcaatgcggaatgctgcgcctggtccatcaaatgggttttcagggattccggagccacgacggattcatacatgaaatcacggcgggcggccgcgtccccagacaggcggccttccgccgtaaactcgttccacccatcctcccgctcattccaggcatccccgtccgaaccgtcttccagcgcttccggggaagcgtccggcaactcctcaagcatgggattggtttccagcgcctggcgtataatctgccttaattccaaagcggaagcctgaagaatctgcatccccgtctgcatggactgggaaacggccatctggcgcgtcattccatgctgcagggatacctcactcataccgcccacaagctacaccaccccccggaatctggcaagggggaacaccctgcagcaaaaaaggccaccattttcatgtggcgtttttggaaaacgttcatataataaatgccaatgaagattttgcacatacttgctttctccctgctggcctcccttctctcaacggctgcgccgtcccctctgactccgctgccacgggaacagccccaatggtggaggaagcaatatgaacagcaggtggaacaaataaaaaacaacccctgcggcgtccttttcctgggagattccattacggactactggaaaagggaaggaaaaccaatatgggaaaaggcgttctccccctatcatccctgcaatttcggcatttccggggaccaaaccaccaacctgatttaccgcatcacggattccggcatcccggcccaaacggaccccaaactctgcatcgtcatgataggcaccaacaataccggtcatttcaaaggaggggaagccccggaaaaaacggccatgggaattctgggtgccgttgaacacctgctggtcaggttcccggacacccacgtcctcctgctgggcattttcccgcgcggcacaggtccccaggacaagctgcgccagcacaacgaccgcatcaacgccattctggcccagtgcaagctaccccgcaccacttacgccaacatcaacaggcgctttctggactcctccggcaaactgctccccggcatcagcagggacaacctgcactttacagaaaaaggctacgccatctgggcggacgccgtgctgccctatatcaaaaaatactgcaaatagctttctttcccatcctcaacgcatgactgtcggaatgcccccttccgccagtcatgcgtacggttcgggaacatatttgtcaatcaatgatgaagcttacgcagcaagaactgtccagccttcattcttgaaactgcagtcatggagcctgaaaagcaccgctcatgtccatcaattcatttttcccggcggctccgccctgaatgcttatgagtaacgtccggactttggggagccctctttaataaacggttaagatataaaagcagtacggtgcatggaaagtatttaccgccaagcccgcaaaaaactgcatggatgccagggcccgcgtctgaaaattttgcgcagaaccgaagttgcagtttacctgaaataaatatattataatgagacaatatatcatagacgcttttaccgacaaagtttttcatggaaatcccgcggcgatttgcattttagaacaatggccgtccgaggaattgatgttaaatatggccgttgaaaacaatctttcagaaacggcctttgctgtcaaaaagggggggagctatcatctgcggtggttcacccccggtggagagattaacttatgcggtcatgcgacattagcctgtgcctatgttattttgaacttccatgaaaaagaagcggcaaaagttgtttttcaaactttaagcggtgatttggcggtagaacggcatggtgatctttatgaaatggatttccccgcctatgaattaaaatcagttcccgtaacggagcaaatgatcgacgctatcggcgctacccccagagaagcgtatatggggcgtgaccttttatgcgtgtttgacgatgtaaaaataatcgaacatctcaatccggatctatcaaaagttcatgccctgaacggtcttttgctccatgtaaccgccaaaggtgtggaaactgactgcgtttcccgtacctttgcccccaaatgcggagtgccggaggatgccgtttgtggttccggtcattgtcacattataccttactgggcgaacagattgggaaaagacgacatcatagcttatcaggcttccaaacgcggtgggacactttattgccgcatggatggagcacgggtaaaattagcaggaaaagcagccttatattccattgccgaaacacaatcaagatgaagcgtcaataggttaagaacatatgccgggcgacggaaaaaacgtcgcgcgacataaattatacatgcccaatgacacaaacggcggttttgaataatcaaggacgccgttcttctattccctaaaaaataatgcaactatgctttcaaacatggcggtcaacgggaataactgccatgaagcacaaagcatgccgacaaattccgacgaggtctatatcaaaaaatacatccgccgcagaatatcatatctccaaacgtgaatcataccatgtagcaaaagtgaatattttttcaaacttccatccggtatgcttgtgtctttacaggtgtgtttttataggaaatacaacaaaaaatcatgaaacaaccaaacctctcgaccggaagcaggaatccagccgacccgcctgtgccgcatttggaatcaggaaaaagcgcaaggaacaaaaaaattgctttttcccggggatatcctagagtgcctctccgcaatgagcatgccgcttgccgacttgatcttcctggcttttgccctctccgtggacgctttcgtcgtggcgttctcctacggcctgctcattaagcaaaagcgtttgagcaacggaatcaagctctccctgtccaccggggccggtcaattcctgatgcccgtgctgggttttctgcttacaggctccgtgcaccggtatattgcggcctgggactactggctgggcttcgccgtgttcacctttctcggtgtcaacgtcctccgcgaaggctggaatcaccgcaacgaagaagaggatatgccccacgtcaccagcctgacgcttcctacccttatggctgtgggaatcgccaccagcatcgacgcgctggtagcgggcgtcagcatttacctttcatccgcccagtgtggaaccgaccctaccctccacgcggtgcttctccccgccgccgccatcggcttcaccaccttcctgtgcacggcggccggctttttcctgaccagacggctgcaccgctttccgacctttcatctggaagcgggagccgggctcatcctcatcggcctgggcgtcaaaatgctctgtgaccatttgtgctgaaatatgccgcgaaggatgataaaaacgtccttccggcatcgtaataagtcgaaaaacgcactggttccctcccacctctttctgctattatcaagtaatcccttccacatgaatatttcacatcttcttctctgcacttccctgctcgcggctcccgtctgcgcggcgcagggcctgacggaaactgaaacggaaacgccggcctcctccagccgcctgccggcgcccctggcacaaaaaattgcctccggagactttgatggcctgcagacggaactgcgctccaccctcctgaaggctggagaacaaacgaaatccgaacagaaactgctccagaacaagcagtaccgccatttgctggacattcacgaactcctgcgcgtcacgggaccggacaaggtgaaagccgttttctccaaaagcgcgcaagatgccgctttcatcaaaacctttctacaggagccggcgtggatggagctttaccttggagcaggcctgattccggaaaattcaccggaaggccttcaaatcctctccgacatctggaaagcggacggcaagagcccggatttccggaattaccaatccctggccaccgggctggcctctgtcttttccaccggccccatggcgggaaggctcaaaaccaactccgccaacagcaatccggtgcgccgctaccggattttcaaaaaactgcatcaggaaaacaaactgcatccgggattcatcaaactgcgcccatgggaaatgcgcttcgtcgtgggaagtccctgggacgataaatcctatgaatggagcaatgaacacgtcaacctcccctggcggcgatacacggccgcctgctgggccgctccctatacgggccacaatttctttggcgataccattcaggggccccttttctacgtgccgtggagggatcttaacacgaccgcggaaaacacgcagatcatcggcggcgtttgcggcggcctctcctatttcggcaccatggcggcccaggcccacggcatccccgcttatccggtaggacaaccgggccactgcgcgtacgcggtgcgcgtgaagcggggggaatggaaaggcggcttcggcggaccagacggaggcatgcacaaccatatcttcggctcccaggctccgacttcctacctgctgatggaaaatgtctttgctgacaacgataaggcggaccaggcctacctgtgggccgcccaggcccggctggacgaggcttccggcaacaaggacaaggccattcaggcatgggaggaagcgctcaggcaaacaccgctgcacccgttcttccgcacggagcttcaacgcctgctgatggaaaaggaaggcatgcaacctgtcgactggtacgtttacgccaaggacgccctttcccactatcagggcaacggctttgccgcattcgacatcctcaaggacgtgcagaataaattcctgatggatattccgcccgcggaccggattgcctggttccgggacctgcatgaagccatcgccaccactcccacatcatgggcggtgaaattccagcccgtgctggactcccaatctgccttcctggcaaatccgcaggaaaaagcggcctatctggaaacagtcctctccacccacctgaaaacgggggacggcaccaactttggccaggcgttggaatggggcgtgaaaaactttgtggaaaacggacaggcggacgtgttctccaacgcattcgccaaggtagcccagcaaacgggaaaaaccgggacctccgggaaagcccccgaccccaaaaagctgaaggaagcctacggcaaagccatctatgccacggaaacggcccgctccattccggccttccaggccttgagcaaagcggcggcctctttctccggcgccaatgcgacgaacaatacggtcaaggcgtccattccgcagggctggaaactggtgcccgcagacggcatggtccggtgctccaccacgagccagtgggacagcccctgggaccatatcaacctgctgcgtccctgcggcggagcccagcatacggataaggaagccaatccgaacgtcattgtagaactaaaaaacggagtgaacctggccgggctggtagtcaccaagcgcgacggcaatgaaaaccggatgaagaaaatggaggtctccacgtccacggacggagccacctggttccccctggccgccacggaaaacatgcccaaggaatgggtcatcaccgcaccggaaggcaccaaagccaagtggatcaaggtggaagccaaaaacgcacagccggaattcatgcacctgcgccatatcctcgtttacgaaaaataaattctccattaacgccatgcttcatcacatcaatcccgtttccggcctgctggccgcagccctcttcctgtccgcccctgtccaggcggccctccccgcttacagcgccgtgaaagacgaggcgaaaaccgtcaataaatacatgatcgtcgtatgggccggcacggactgatccccaaaatcacgtgaaatcacccgcgccgtggaacacctggccaaaaactccccggaacccgtgctctggtgtatccaggacgagcgtgaggaaatgacggaagaagagcagaaactgcccaagcccccgggggaaatctggaacatccccgcccttcaggtggtctcccccaccggaaacatggtattcctgtcggaaggcgtctccagggaaacattgccagccgtcatgaaacaggcaatggaagccgtaaaacagcaaaacaaggccaatgccctgtgggaaaaagccgccgcttcatccggaacggccgcggcccttctttacggagaagggcttcagcagcttcctccttatgcggcctctgccagaaaggatattctggaaaaaatcaaaaaggcggatccggaagacatcaagggagtgcacttcaaatacacgttcaggcatctgccctacatcgaaaaagtgcagagaatggtgaatgattccgccaaagacggcggtccaaaggattacaaaaccgcccatgcctatgtaaacaaacagctcaaaacccccggcctgactccccttcaaaaacaacaggtcatggcggccaggttctggctctaccgcaatgaagggaaaaaggataaagcgctgaagaccctgacggacatcgccaggatatcccctaaaaccctcatgggaataggcgcccagaactactaccgctacctgacggaacccgtcaccctgaaaagtcctcacttcacaggctacgacctgcgtccggaactgacgcctacccgcgtcaacgtcagcagcatgcttgacggccccggaaactacaagatcaccttcaagatgaacagcggcggctgcaatatccgcaacccccgcttcatgaagggcaaccgcgtagtcagtgaactgcccaaggaccggcaggacaaaaacgggcgcgaattcaccctgcgcctctccggttccgaaaagccggacttggttttcgactgccagggccagggatggttcgatgcggactgcgacatcatcgtgaccaaggaatcctgattcctgccggcaaacgaacaaaaccgccattcacaaccttcacgaaggcaggacattcccaaggaatttcctgccttttttccgatgggagaagaatttccagccagcgcccaagcggaagcatccctctctccctgcttcttgccggccaaagccgaacaacattcccggcagcttcaaaggagcaatcagggaaaccttcttctcattcccgcgttttcaagggagaattaccccttcttcccgccttcccaggcgttctccgccagttgacggcggtattccatgcgttcccggatcctcagttccatcccgtttccggtgggggtgtaatacacgcggccttccgggaggtaggcctggggtacgtaatgttccggatagtcgtgggaatacagatattccagcctggcggcatccgctcctccggcggcagccagcttcttgcgcgttggcgtccgcaggtgttccggaactgccagcgtttttccattgcgcacgtcatccatggcggcattgatgcccacgtaggcggaattgctcttgggggccgtcgccaggtaaaccgcagcatgcgccagaggaatgcgtgcttccggcatgccgaccatttccgccgcacgcgccgcgtccaaagctacgcgcagggcgttggaatccgccagccctacatcctccgacgcggcgatgaccagccttcttcctataaagcggatatcctccccggcttccagcatcatccccagccaatacagggcagcgtccgggtcagagccgcgcatagatttgatgaaagcggaaatcgtatcgtaatgggaatcccccaggcgatcgtacctgatagccttgcgctggatggattcctccgctacggagatgtccacatgaatgacgccgtctttccccgcaggagtggacagaacagccacttccagagccgtgagcgccttcctggcgtctccgtccgctttggcggccaaatggttcagggcttccgcctccatatccacgcgggatgcgcccagcccgcgcacctcatccgccagggcgcgcttcagcagggcggccagctcctcctccggcaccggctccagcgggaaaacctgggagcgtgacaggaggggggagttaatcgcaaaataggggttttccgtggtcgctccgataaacctgaccgtacctttttccagatggggaagcagaacatcctgttgagccttgttgaaccggtgcagctcatccacgaaaagaacggttttccgcccgtgcatgctcatcctcatctgcgcctggactattttttcccggatgtccgctacattggattccacgccgttgagcatcatgaaatgggcattcgtcgtccgggcgatgacggcggccagagtagtctttccgcacccgggaggcccgtagaaaatcagggacgtaaaccggtccgtctcaattgcccgtctcagcagcttacccggagccagcagatgcttctgcccggccacttcatccagggtgcgcgggcgcatgcgcgcggccagcggcatggcggaagtgtccgccccgggctcaaagccttcccgcgcttccgcttcctgtaaactgaacaaatccatcggaaacactttacccggttgaaaggccggagaaaaggccaatccccggaatcctgaaagtttggcggaagcgataccgttccccctcctcaggacggaaaatgcacctttatccaaacatggatcagcaggacagcatgaaaaccatgctgacaggagccaaaatgctgaacagcagccccgcaacagccaatcccctgcggttcacctcccagtaatgaagggaggcgatcagcatccagatgggaatcacaaccatgtggacgagacccaggagcccccagcccgccagcaccagcaaaaagagccatgactgcgagccgtccgcattattgctcggcatgacaaggccaaagaagcggtacacaagcaaaaagaagacgaatatggcaaaaggtatccatccccagcgggcttcctccttccggcgggccatggccaattcaaaacagggatctttaaacgcaggcaattgcttggcagaagaatctctgaataaatacatatcgcccgaagtctctattattactcctttcttccgtcaacaacattcaatgccagcccggattttttccgcagaaaattttcccctctaacaaatacggaatatcggcttccgcccattaccttattgtcaaaccaaaaggttttgaaaaattcatgaaacgctcttgattataaataattttcccctttttcggatacttgctcttcgtcttttcccatgataaaaaagtctttttgcatcatccgaatttcaacacccgttcaatttgtcatacacagccccagtttcccataaaaaagactgcctccgctacaggagcggaggcagtccgggggtaatataaaaccggaaattacagaaggttacctgcccagaatgcccttgaagtattccagcgtcgtcgccaggccttccggcaaagtatgcctgggctgccatccggcattgcggagcttgtccgcacaggcgcgggaatgcttgacgtctcccggacgttccggggcatgaagcaccttggaggaagacccggcagccttgatgatgttctgcgccagctcttcaatggtgatctggccgccgtaaccggcattgaacacgccggtgacttccgggtgttccgccacaaaggtaagggctcctacaatgtctttcacataaatgaaatcgcgcgtctgggagccgtccccatacacggtgatgtcttctcctttgacagctttttcaatgaaaatgggcacggccgcggcataggcgcccttggggtcctgccgggggccgaagacattgaagaagcgcacggctgccgtattgatttttccttccgcccggaacatgttgaggtagtattccccatccagcttggtaatggcatagggactcttgggttccgggtacatggtttccagtttgggcaccgtgggattgtctccgtaaatggcggcggaagacgccagcacgatttttttgactccggcggcggaagcttcctccagcacgttcagcaaaccgttgacgttgatgtcgatgcattcgctgatcttgctcatggattccggcacggagacgagcgcggccatgtggaaaatatagtccactccctgcaccgcctggcgcaccagctcccggtcgcagatggaaccttcgatgaacgtgtgcctgagcccttccaggttcttgagatagcccgtgcgcaggttgtccagcacacggatttcctccgccttatcctgatagtgttccacaatgtgggaaccgatgaatccggcgccgccggttacgagaatcttcatgtttttccgatgttggtagatattggttaatagcggtgcacaatggccttcatttcatccatctgcgcctcaatggattctaccagggccatctgcgtgcggcagcggtccaggttgtgttccggacggtggattttaaaatacacgtcaccggacaggtagtccgtcaggaagcggatgccgcattccatcgtgagcaatttgccggagaacggcagcaggctcttttccagaggcgtcaggaaactcttggcggaactcaggtaaccctgaaccagagcttcaaacatgaacatgcgcatcgtgaccttggagacgtccttttcatcttctgcggcgggagacgtagccgtccggatcatgtcgccgaagtcgtaaatggcggaaccgggcatcgtggtatccaggtcaatcacgcaaatgccttctccggttacatcgtccagcatcacattgttcagcttggtatcattgtgcgtacagcgcaggggcaattccccggatttcaggtaatccaccaccagatggcagtccgactcacgggaaaggtaccagtctatttccttctgcacttccttcacgcgccccagggggtcggactggatggcctctttcagagccgccaggcgggaagtggtattgtggaaattgggaatggtctcaaacaggggctctccgggcaggtctgccgtaagcttctggaattcgccgaaggcgcgcgccgcttcctggcactgcttggtagtttcaatctggtcatacgtgcgtgcgcgttcaatgaacgggtacacgcgccagcagttgccgtccgaatccagggcgtacggcttgccgtccacggagggaaccagcgtgagagtgcggcggtaagcttccgggcactgttcctccttcaggcgcttcagggcgtgatccgtcacgcgctttacgttctccatcagagggatgggctgcttgaacacgttatggttcacgcgctggaggatgtagcggatgcgctgtcccgcctgatccacccagatgcagtaggtgtcattgatgtggccgctgccgtaggaataaccgtggacaaaatcgccgcggagatcgaacagggttgatacagccttgagatcgtgcatagggaaaaaggcttagttgagcttttcagggtatacgccctgctggataagtttgttgatgccttccacaaccatgggcttgtcccccggataggtcatgccgaaccaggaggaagaagtgggaagaacggcgcaatccgcccggtccgcatgaatcagggcgtccaccacggtgggaataaagcattcgctcttgggttcctggccgtgttctttcaggaagtcaatgaaatgatcctccgtcagttcaatgaaggagggggagaacagccagaaattcatggaaaccagttctgcaggatccaccggcaggcgttcgcccttcaggttgttgccgcgcactacgccgtcttcgtcagcctggattttcacgaattcctccacgccatccagaaggccgcccttgatggagcaaatgccgcggttcacgtccccgttgtcggagagggtgttcttcagcggatagccgatcatgccgtaatgggccttgccgggttcatccgtagtggaggtcaggaacttggcggcctgcacaaaagcgtccgcaccgtaaaagtcatccgcattcactacggcaaagggttccttcaccacgtggcgggcggcacgcagggcgtgggcggtgccccagggcttttcgcggccttccggcacggagaagccttccggcaggtcgtccagggactgaaaagcgtaatccacctcaatcttgccggcaaaacggctgccgaccttttccttgaaaatatcttcaaagtcacggcggataatgaataccacttttccgaaaccggcccggatggcatcataaacagagtagtcaagaactacttccccgttggggcccatcgggtcaagttgcttgagaccgccgtaacggctgcccatgccagctgctaaaacaagaagtgtaggcttcatcatacgcaggccattatgaccaagcctccccgtttggcaacaggaaaatgccggaaaaccggagaaatccgcccgttaaaaaacgtaagagcaccaaagccccagcactacttttttgaaatcgtcccgcccgtagccgcaataccaccccaggaaaggctccacccgcagaccgccggaaacggcccacagcgcccccgtgcgcaccatcagctctttcaagccgttcctccccagataatcgtgggcaaaacccagggaaaccgtattcaccatggcgacggattcgcacagcaggggctgccaggtaacgccccactgggaatatgcaccctcctgtccggaatcatacaggaaggaaccgcggaaagaccaggaaggggtgggattccacttaagggacaggcccggctccgccccgttcttcaggggacaggaatcgtaccactgcccgttgacaaaaagcccggccgtgcattcgtccgccagataatactggacttccccgtgtaaagtggcctgactgaaatggcggccctgccagttgcggatggcgaaaagttccccgctcaccgcccaggaatcagacagggaggctccgccggaaatctggccctccgtggaatcagcccccatcttttccccccggtggacatagtatgaacggtagccgccaagcatctccccgcccatgcggatgggggaacggccgtccacctccgtcaggggcggcggcccgtcataccccaggacggcctgcacggcacagcacaggatgatggaaaacagcctcatgaaagacttttaacacaattcgctgcgccgctccaacgccaaaacggtgcatgcacattctccgggcttggcaaaacgggaatctgcccttaccctctcgcgcatggttcatttcaccctgttcgggatacctgtttacatccgccccagcttctgggtggtgctggccattttcggcggcgccctcagcatcagcagtgtggaagatctcatttatccggccctgttcgtcattgccggcttcatcgccatcctgtcccatgaaatgggacacgcgctggtgggccgcaagctgggcggcggccagcagacgattgttctggaactcttcggcggcctgacaagcagccatggcatgcaactgacgcgcggagggcgggccctcatgattctggcaggccccatgatgaccctgctgctgggcatcatcagcctgtggctcacctggaacatcgtcgctcctgtcatgacctcttacaacctgaacttctgggacctggccatcagccccttcacagcagcgctcatctcccccaagctgtacattctctcctgcctcatcatgattggagaatggtggactatcctgaatctgctgcccatctaccccctggacggcggccagctgatcgcccagtacatccgctcccccaggaaagtattcatgaccggcttcatcacggccatcctcatcggactgctcagtttccagcttttccacggctactttatccccatcttcatggccctcttcgcctacagcaattaccgggaatacaaaaacgcccccttttaatattattccgagtttccttcgcgggccccgcccgttctattcaacaaaccatccaatatgtctcagcaaaccgcaatcacccctacccgcgcccaggatttccccgagtggtaccagcaagtcatcaaggccgccgacatggcggaaaattccgaggtccgcggctgcatggtcatcaagccatggggctacgccatttgggaactcattcaaaaggacctggaccagcgcttcaaggacaccggccatacgaacgcctatttccccctcctgattcctatctcctatctggaaaaggaagcggagcatgccgaaggcttcgccacggaatgcgccgtagtcacccaccacaggctggaagcgcaaaaggatgaagccaccggcaagacacgcatgattcccaccggggagcttacggaacccttcgtcatccgtcccacctcggaaaccgtcatcggcgcggctttcgcccgctggacctccagttaccgggacctgcccctcaaagtcaaccagtggtgcaacgtgatgcgctgggaaatgaggccccgaatcttcctgcgcacggcggaattcctgtggcaggaagggcatacggcccatgaaacccgcgaggaagccattgaggaaaccctcaccatgcacaaggtttatgaagaattccagcgggacgtgctcgccatccccaccattccaggggaaaagacggaggcggaacgcttccccggagcggaacaaacctacacggtggaagccatggtgcaggaccgcaaggccatccaggcagggacctcccacttcctggggcagaacttctccaaatcccagaacatctgcttcgccggaagggacaacacccagcaattcgcatggacaagctcctggggcgtttccacccgcatgatcggagcgctcatcatgatgcactccgacgacgacggactcgtctgcccgccccgcgtcgctccccagcaaatcgtcatcattcccgtcacgcccaaggaagaaagccgccaggccattcttgaccactgcgaagaactggcgcgcaccctccgcaccaaaaccttccacggccagccgctgcgcgtgctggtggacaggcgcgacctgggcggcggcgccaagaaatgggaatgggtaaaaaaaggcgtgcccgtgcgtctggaaataggcccccgggacctggaaaaaggctccgtctgccttcagcggcgcgaccggcccgccaatgaaaaatccttcgtcccggaaacggaactgatcgataccgctgcggatattctccaaagcatccaggacaccctgcttcagcgggccattgccttccgggactcccatatccgccccgcctccactctgcgggaattggaagaaaacttttccggagagggagatgcagactggctccaggtgccgtgggacgggtctccggaagaagaagaagaactggctaaacggctgcgcatttccatccgctgcatcccgctcggcgagctgggccgcggcgagccggcaccctgcatcctcaccggacgcatgacgaaacgccgtgttctctgggccagaagctactgaaccctgacaccccctttcaacgggattgttccaagacaggcaaaacgggccttttcggaacaatcccgttttttacgcctctccactttccccaaaaacggcatgaacaagaaacggagcggcataccccacagggcagaatccttccctctcctgccccatacgccggcaacaacgcacacatgtcggcaaaacaggatttttctctaaaaaaatcttgccaaggcagaaaaaccttatatactcttggcacacggacgccgtaaggctccaatcgttccaagcggatgtagctcaggggtagagcgcaaccttgccaaggttgatgtcgtgggttcgaatcccatcatccgctccaactttttatagcaaaaggcccgcacaaatgttgatgatgtgcgggttttatattatggttcgtacagaaaaacctgccccccctattgcaacaccgttccaggaaacattttcatctgctctggtgaggcccaccgaacgaccctcctccatgcatttcatggaaatgttgtcgaaaggcggcctccgtcaacattgcagacgttgccggttatcacaggcgcatcctgtattattgcttaatgattcagtatttatcctccgggacacaggcggacttaatgatcaccgtatcaagaacctgacgccatctgtcatacgcggaatgatataacgcaaatcaggtttcctcatctaagcattcgaatattcgctgaagaatcagcgacagtttcattcctgccacgttctattctctcttgacggccagactgaccataagaagcgtattcgtgcaaagcacactgtcctgaacgattccccagatagagcgttcgtgttcttgaacgtgtcgtgtgtatagtacaactctttcatatgggtttccgtctcattgtagacagaaaagcgaatgtttttgtcgaatagcgttacacaaactataggaaacaggatcaatgatggcacatgcttaaaataatcttataacgcttcgttcatcaactgccgcagaaagtcggtcggcaacgatgagaatctggctccctccatcaagaattagaaaaagataagacaagcagagcaattcccgtagaaatagggaacataattccgcatttatctaatagaaaagtctccatggaaaatatattttttcgcaacaaaccctgtaaggctcttcttttgattcagggggaattttgatttgcacttcgatacggcagcctttcacgaggtcagggttgtttaacagatactcctcgacttccggaggaatccgggcattcgttccgtcttcgacaacgaaccagatctcacaagttttacctctccaggaagctccatcgcctgttaatttcattccatgccgggcaaatatcttatggagttccaaatcctttttcactgttttcaacagagttacactcctcttcataccgtttcccttatctatgcccgaccagaagagggagaacggtaaataaatgaagtaaagagcggctattcctattacaatccacattttctttttcattgtaaataatttatcggcattatttactttagtcttgtttcgttgaccttcccgattttttatcgaagcaatttactgaatatcaacatcaagaatattctagaaatcttacagcaagattattctacataattccgaaattaaataactgaatcagaaaaaaatattgagcatgtctactcaattaaacaattggcataaatttacattcatgccaattattgtttgggatgatatttcccctcaaaaggagtatgtactttacccgacacccatgtcccatctataggagatatgtctatataatatgatccaggagaaaggaagaccttttcttctttatctcgtttcgcgtataaaatacctttacgcaggacaaaatcaatgccaaagaattttatatgctgattttctttaagtataatttcttgtcgtgttctctgggtggaatggtaagatgttacaaagacttgaatttctttattaaaatctttcaatataatcttattcggtttcatataccgatttttatttttttcagatattgcacagttgttccataatatggaaaacaaaatgagcaaaactcctggaatatatttattgattttcatcgtatggacattcgatattttttaaaatagcatctatttcatgttgattgacttttccataatatgtccttcatttctattcatttaatagaaaagtctccaaggaaaatatattttttcgcaataagtagtgtaaggataaccattatttggaggtgccatgatttgtacttcgatacggcagcctttcacgaggtcagggttgtttaacagatactcctcaacttccggaggaatccgggcattcgttccgtcttcaacaacgaaacaaatctgagcaagttttacctctccaggaagctccatcgcctattaatttcattccatgccgggcaaatatcttatggagttccaaatcctttttcactgttttcaacagagttacactcctctccataccgtttcccgtatctatggccgaccagatgagggagagcggtaaataaatgaagtaaagagcggctattcctattacaatccacattttctttttcattttaaataatttattaattcttttttcttattcgtgaggctctcttccttcgccatagcctctatgcccttgaggagctggagccagaagaggagtatcggggataaacggggctacaaaaccagctccttccacgatttcacacgaccatccgcagcaattccttgctcccgagttgtatagtgaatattgagggacattcttttcatcttcccggatctgctcttcaactttacttactgattcaggacaggctttataagcgtaggaattaccagaatacgcatgtttttcattagaggcatcatcccgaatttctccggctccaacgcctaaagcgcctctgtgccaacttccggggtaaaggcctctttgcatattgggtgttttgacccaggcatgtcctacatttcctgaccagtagctgcatggtttaaccaaaataaaaatttcctgtatttcatattcgcaacattcccttcctgcgtcatccgcaattttagagtattttacaccatccttgcaacattccgtttcagcatcttcagaaaggccaagcgtatcagagtacaggcatgtattgttcttgacaaagatataaagattccatccgctctgttcatcgacaggatctctgctgatccaccttccatcttggggattatagtagcggtaattgtagtaaaccaaccccagctcgtcatcagcatactcgctggagaaccggaacggattcaactccgccgcattgccttccatcttcacggcagagccgtacgggccgtattcatacaaggctcggcggcccgccttgatgccgaagagcgccgtcgtattcttcaatgcgtcatgcgtatagtaaagatcttccacgtaggctcccgtttcatcaaagacgcccatggccagaatgcgcgtggccaccggttccagcggatcccacaggtacgttttacgcaggacgggtaccgcggattccaaaacctccgtggcatccagttccgcgatttgcaggtagccgtgatagatgaaccgtttccttgacatgagcgattctccctcatagacggatttttcaacccgcctgttcagataatcgtatacgcattcaatacgcctgtccccctgtatgaagctgaccgcctgattcaacgcgttgtaggaggcttcccattccccggtggcggtccggagcttcgtctggttgccgtcggcgtcataattcggcacaaaaggaacctcctcaccttcggtgatatccgtatattgattgacccggttggcaacgtatgtagtgggaagggaatccgtcccctccagagacgttttgcggttgcctatgttatcgtaggagtagctgtatgtgccgccccggctcatcgcatcgctcacaagttcattcctgtcatcgtaggcgcaggtgtgcgtcaggtcgggtgcaggcgcgttaaagtagtctttcttcgtgaccgggcgccccagtatgtcgtaagagtagtcggttttggccgggtagttggcgctgccggggcgcaggtagtcaatcttcaccgggaggtcgcgcttttcttccaaagtgcgccaccgtttcagggtgttggggtaatcaagagtgtccagcaggccgttttcctcattgtagccataggtgaagggcttcccgacggcgttcagcgaaacggaggaaagccttccggaggcgtcataggcccatgccgtctgcaagacgggggcgcccgcataatccagacagtagcccgcaggcctccccactccgtcacggcggagggttaagacgcttgccgcaaggccagccgtcgtttccgtttcctgttcgttatactggttgtacgtgaacatgcgcgttccggaagcgtcatcaatctgcgtcagctgccccagatgattatagaggctgctgatggagggggtaaaaccgtcgtcattaaaggtaatggaaacgagctccccagtaagggtggcgtaggagcgtgaggcaacggttcctcgcgcgtccgtcgtagcggcaacgcggttgagtgcatcgtaaacggtatccacatgggtggcgtcggcataggttttgcggataaccagccccgtagcgatatcatacgtccatgtggtgatgtccccatccgtccggaggcggggatcagtggtaatgacatctccgggaacacggaaggtggaaaggctcaccatatggccggcggcgtcataagcatatacggcgggctgtacggctgtcccccattcggcttccttgcggccccggatgtcatagaaagaacaggccgttttgccaagagcattggtaacgcaggtaggcagatcaaaaggctggccataagcgtaagtggtcgtgttgcccgcggcatccgtgccggagatgatgcggccggcgatgtcgcagacggaggtaaagacattcccgcgcacatctgtgtccgcgtaggtgatgcccgtttccgtataggtgcgccgccgaaggacagttgcaccgtcaaatcccgtaaccgccgtcgtgaatccgtccacgatgcgcgtgaggaagacgctctcgacgccgggcacggttttcttccgcaggcgaacagaaccgccgccatattccatccattccacggcatcatggccgcgggaatccgtcatgacggttttgccggcaaggacagggctcagggcagagagcaaggtcgcccgcttttgaagaacaggagtacctgaggaagtatagcttgttatggaaacaagactatagactccgtcttcacggctctcggtcacataagcatagtcagtaatgcgggagttcaggatggtcgggtcatcctccagggcaacgattgccctggtcctgttcccaaaagcatcatatgcgtagagggcgggcgccatatccgccagctgttccctgatgaggcgccccttgtcatcgtatgcaagcgtgcgcacgttttccccattcaaggtattggcggcagcgatccgtacaaggtcgccaaagccgttgacggtggagcttcccgtcacgacgcggggatcgtccccctccccgcccggcacagcctccgtcgtgcggattccttcttccgtgacctcaacagtatagaggatatcctgctgcccggtgccgtaacgccgcaatattgttccggaagcacttttccgggtgatgagggtagcgccggcgggggtggtaacagtttctaccaggccatccccgctataggagcgaacggtggtgcgccccagaatatcggtttcttttaccagacgccccagcaaatcgtattcccggctttccaccgtcgtcattgggcctgtatccctgcgcagggaggtaattttaccgagggcatcacgagtgtaactcgtgatggtttccggagtgatcatggtttccccgtctgcaatggctgaacggatggtttctgtcagctggcgggccgtattgtaggaataggaagtcgtcacgccattctcatccttttcccataaagggccgcaacaggtcatcatgcgctcgtaaacgcgtccattggcgcgggtgcgctttacccaacggttctcaacatcatattcataagaagacgcatccgtcattgaccaaacaccatcggcaagctgtacgtattgctcataacgcatgttattgccctggccggagacgtaagtaaccttccgtgaactcaggccgggcacgcacgcacccgctatccgcgtttccgcggtcaccttgtaaagggatccatactggtccgtctcttcataagcgtaatgcgtttgaattccgcccatgtcctgtttcattttcaagcgtccgcgggcataaacattgggagccgtgccaagccaggattccttcacttccagacgcacgttttcttcccccaatgcggtggtgcgtttttccacgcgccgcacatgattttcctcaatgtaaatataatccgttcgccagagttccgccgcagtagccgtcaacgtcacccattgggtgagaatatccggatccgcctgcgtctgatcccgataagtggtgtaagtgactttatctccagcttccgcccaggggacactggacacgatttcacgcccaaaacggtcgtacgcccatgttttgacacttccgtcaggagcagtttccttcgcaatttttcccatgcctgtgtactcataggtcgtctcccgggcgtaatccgttccgtaaccttcaatacggctggtgcacaaattgccattgcgggtgacggcataagtctcacagacacgggagatagggataccgttttcccctctctggatggtagtgatgagtttccacgttccgggagagacaatctgcttttccttcagagtgaagatggaatcttctccttccccctgagacatgttccatgctccgtcagttccctgccagtagcgggtggtgaagggcgcgcgcccggcggtttgttcggtgacggcaagcctgcccgctgccgcgtccccggtgatcgtgaatgttttaaatgggtcgcccgtaacgggataaaggccggtggagctgtttttcccatccacctgttcggggaggtagagggcgatgcgatatccggattccgtgacattttcgatgttggcaagcccatcccacaggttccatatctgccgaatgcttccatccgaagcccgcacgatatccagctttccgtcaaattcttctcttgtgtaggacgcgccatttttagcggtgtagccggtggcgtatttcaaggaagaggccacacctgcggtatagttaacagtattacccgcggttgaacgaatactgaggcagaattctcccgcctttactgaagaagcggacctcctcccgaaccacgcagaccctccgcgcttggcggatcccgcaatgggggcaacactgtcaaccccgctgccgccaccatccgcgtagcagtagtaattaatgtcagttcccccgctcctgatttggaaagcggtattcgctccaattcccgatagcggcgccgaaatgatttcatgagtcatcggatgccagtaatggagcgcacgaggggaccagagttcagacgaaaatgtgtaccctactatgtccagcaacccctgcggcaaccccgtcatgccccggaaagagccaaaattggtacgccagaccatttccgtcttgagcgtccgggcgaccacgcgcctgccggcagccgacgagccataaagggtggaggaaccgcgcacgccgtgcgccgaagagctgctgctgccgccctcattgttttcacaggtacagggggcctcatcttcaccgttatccccttcaccgttgtcttcctccggacagggaaaaccggaactgctctgagagccattgccgtcccccccgcattcacacggcacgtcttctccctcatcttccgtactcacaggttccggataaccttcatccggctgataggaggatgaagaggtgccatccgagaccatgacttcaatggaataattaaggattgccagattagtccattcaggaggaacagcaacgttctcataagtcatgtgtacacggtgcggtcccggttcaatgggaaagctcaagcttttctccctataagtgcctccatggtatttaccctcccctggaatgaaaattccttcaccgtcaatggtcagagttccgttatcatctacccccagcattaaacggcactccgccgtttcccccggaccgagcggatcaacaataatcccccagtcccagctgccgctgaacgccccggcctctttgtcaaacggagccggcccacctccggacactgtgagagcattatcaggcagagaatccacatgatgctgaaactgccgttttctcatgaaatccaaatagttagatattaaggaacaaatatcgggaagtcaatgcttccccgtatttattattcttatctatttcaggaaataaaacagaacaaggatttatttttgaataattgttattaacaagaataaatttctatcaattaacattttataaaatatatatctttcttgaaaattcataagggataaccatgtgttgacgcgtttcccaactcccggccattcactgccggccaggatatcccatccggaaggtctaaaaatttcccggcctccattaagacaaactccggcggttctatctgcatcatcccttcaacgaaaggttctcccgcctggtcgtccagataaggccggtgtcggcactttctttacgccgtcccaattctcaacccggaataaaccaatgaataatacgactcaaccaggggcttctccaacaggccccgcaacaaccaataacgctccggcggtaaaatccgtcctccgcatgggagtattcactctcgccatgatcaacgtttccgccattgtcagcctgcgcggcatgcctgcggaaagcacttacggactgagttccgttttttattacattttcgccgcggtattctttctggtgcctgtttccctggtcgccgcggagcttactaccggatggccccaaaagggcggcgtttaccgctgggtaggcgaggcattcgggaaaaagtgggggttcctggccatctggctgcaatggattgagagtaccatctggttccctaccgttctgacgttcgccgccgtttccctggctttcatggggcccggacaaagatgggatgaagcgcttgccgccaataaatggtatgttctcatcgtggtgctgtgcgtgtactgggcggcaaccctgcttaatctgcgcggcatgaaaacttccgcaggcgtcaccaaatggggaaccatcatcggaaccattattcccggagccatcctgatcctgctgggcctgggctattgggccggcggcaacccgatcctgctggatatgagctgggacaagctggtgccggacatgagcaatttcaacaacctcgttctggcagccagcatcttcctgttttacgcagggatggaaatgtccgccgtgcatgtgaaggatgtgaataatcccgggcgcaattatccgctggccattctgatttccgccatcatcacggtgcttattttcgttctgggcacgctggccatcggcttcatcattcccaattcccagattaatctggtgcagagcctgctgattacttatgacagctatttcagcttcttcggcctcggctggatgaactggattctggcgcttgcgctggccgtaggcgttctggcccaggtaaccgcatgggtgggaggcccttcaaaaggcctgtaccaggtgggcctggccggcaaccttccgcccgtcatgcagaagcggaacaagaacaacgtccagatgggcatcctttttatccaggggggaatcgtcaccctgctttccatcatgtttgtgatcatgccttccgtgcaatccgcctaccagattatttcccagctgaccatcattctgtacctcatcatgtacatgctgatgttcgcgtcaggcatttacctgcgctaccgggaaccgaatacgccgcgtaccttccgcattcccggcggcaaaaccttcggcatgtggattgtcggggggctcggcttcctggccagcctggcggctttcctggtgagcttcatcccgcctaaccaaattaccgtaggcagcagtaccatgtacattctccttctggtggtgggcaccttcattttcgcgggtattcccttcatcatccatgccatggccaaaccctcctggaaacggccggtggatcccgaagacgcctttgaacccttcggatgggagaaaaacaatgattcccattccgcagcaacccctagccattccatatcccatgagtaacattccttccaatgaacagatccggacggccctggataacgcatacgcctacgccaaaaccgtccagggaggcaaaaacgcctcgtacattcccgccctggcccaggtgccttccgacctgctggctattgccgtggtcaccgtcaacggagacctgctgaccgcaggctccgcggacgcgcccttcgccattgaatccatttccaaggcattcaacctggcttatgtcatggatctgatcggcatgaagcagctgcgcgcgaaaatcggagcggaccccaccggggaacccttcaattccgtaatggccattgagctgcacggcggcaagcccctcaatcccctggtcaacgcaggggctatggcgacggtcagcctggtcaacggttcggattccgatgaaatatggggaaacatgatccataatttcaataacttcgccaacacggccctgaccgtgaaccaggagatttacaagtcggaaagcgctaccaaccagcacaaccgcggcattgcctggctgctagacagctacggctatttttacaatacgccgcccatgattgtggatttgtacacacgcatgtgttccctgaatatcaccgcttcccagctggccctgatgggcgcctgctacgccaacggcggggtcaatcccgtcagcaagaagcgtgtggtgaaagaggaaaacgttccccccattttggcggaaatgtgcatgtcaggcctttatgattccacaggggactggatgtacaaggccggccttccggccaagtccggcgtgggaggcggcctggtggccgtagctcccggcaagctggccatggcggctttttcgcctcccctggatcccgcagggaataccgttaaggggcaggcagcgcttcaatccatcatcagggaactgaatctaaaccttttccggagctgatccgggatgagaaggtaaacccgcggagccaaaatccgaaaggattcccgcgggtttactgtatcctgtccagccccccgaggcagaccgcagtttctcgactgcggatttcagccataaaaaacagccttccggaacagtatgctgaaaaacggatatatccggcggacaacggccgcatcgcctgcgccccggcagccgcaggcaatctttccccggcgccccgcatcagctcctgtttgaaaagttgcacagctgcatggctacgccgtcttccataacccggaagccgtgcttctcataaaaagcggcgtttctgctctcctccggcatgatttcaagatacaggtagtccctgtatttttccttaaccatttccaccatttttccagcaatccccctgccctgataggcgggatgcaccagaacataatgcatgtaggcaaccatctcgctgtcgtccagcacccgcgccagccctgccaggcggtcaccatcccaggccgtaacaacagtggacgaattcatgagagccttgaacagacgccccggatattgtccggaaatccagccaacggacaggaacaattcttgaacatcttccctggaaaatttcttctcttccgtaaaaacaatcattttttctttaattaattattgattatccgcccgtaccgtcgcggccacacaaccgactgagcgggaaacgcctttccctcggccggattgacaccctgtttcaaggttttatctgctcccactgccgcagtcaacaccgtcttgtccgagggttttacccatttcaaggacatggcggagcctgtgataagaatgcgcgccggaaacaggcaaccctttccccagtcagcagctcgtccgcccctgcctcttccacttccgggggacggaagagccgcaccaggaacacacatcttcttttcagggaaacgatactcgaatacgggagacggcatttttcctggaaccgattccccaaaaacggaaaactccgggcccaggttcataacattgtgaaaaacctttctccgtcatttgtttaaggacttgtcaccacgcttcttttccctagaatccccccggtatgcttgacgccctccaaaatgcctttttccagaccggggacacgctcacatcctggctgtccgctttcagcagcttcctgtggggatggcccctgctcatcatgctgctgggcacgcacctgtacctcaccgccatcctgcggtttccgcagcgttatctgcttaaggccctgaaattgtattttgtgaaagatcatacggacaagggagatatctccccgttcagctccctgatggtggccctggcagccaacatcggcgccgggaatatcatcggcgtgggcgtggcgattgcagccggaggccccggagccgtcttttggtgctggctgacgggagttctgggaatggcaacccgttattcggaaggattgctcgccatcaaataccgggtggaaaacaaggacggcaatatgagcggaggccccatgttcgtgctggaacgcggtctgaacagcaaatggctgggggcagccttcgccgtcttcacggccattgccgccttcggaatcggcaatctgacgcaagggaacgcagcggcggaacagctccaccacgccttttccattccctcctggggaacagccgccgttctgacggcattgacggctctggtaatgctgggaggcatccagggcattgccagggtatgcgctttcttcgtgccgttcatggccgtcatctatatcatgggatgcctgtatatcctgaccgtacaggcagagtatattattcccgccatccggtatattctggactgcgcctttacgggagaagccgccgccgggggcgcagcaggagcggccgtcatggcggcaatgagaaccggtgtggcccggggcctcttttccaatgaggccggcctgggatccgcagctatcgcctccgccgcagcgcagaaccgcaaccccgtcagacaggcgctcatctcttccagcggccccttctgggataccgtcatcatctgcgccctgacgggaattgtgctgaccaccagcatcatcgcgcatccggacatttcctgcacggacggccccaagcttactacgctggcattcagcaaaattccttacataggctcccctctgctcacgctcagcctggttacgtttgtagtttccaccattctgggctggtcctacttcggagaaaaagcgctggaatacctaggaggcatccggctgatcatgccttaccgcgtcatctgggtggcggcggtcttcatcggctgcgtctctaaaatagaactggtatggatttttgcagactgcgccaacggcctgatggccctgcccaacctcatttccctgctggcactttccggcgtgcttgtccagcaaacacggtactacctctggcaacacaggctggacgattacgacgaatcccacataccggaaggaaaataacgatttttttaactcggattcaaataattcttgcctttcggcttccggtagtatttacttcgccgcgcagtccctgcaaacctaaaagtcgcgttcgtctagcggtccaggactcccgcctttcacgcgggcaacacgggttcgagtcccgtacgcgatgccagctttaccgccgcggcagttacgacaattccgcttttccccttttcagggaagcatattggaaaaacgtaatggctgcggttttcttttggcccggttttccggattcaggaaagcgcggcagaggcgccggaagcggaatccccccctgcttttaaatgccggaacatgtcttacatcccccggatttggctttcagaaaaccccgccatcttttaaaatcctttacacgcaaacgccatggattacacacctctcattgaaaaacgccgccagcgcctggaagaattggaaacagtcattgccgaaccggacttcttcaatgaccagaaaaaggcctcggaaatcatgagagagcaccgccgcctgaaggaactcatggaaacatgggattccctgaacgccacggaacaacagctggcggacaaccaggaactggccaagacggacgatccggaactggcggaactggccgccctggagattccagaactggaagccgccctggaaaaactgcgaagcgacgtgcagtacagcctgctgccccgcgacacgacggaagaccgggacgccatcattgaaatccgcgccggaacgggcggggatgaagcctccctgtttgccggagacctgctgcggatgtaccagcgttttgcggaagaacgcggctggcgcttcgagcatctggaaagcagcccgtcggacgtgggcggattcaaggaagtcgtctgccgcattgccggggaagaagtgttccgcttcctgaaatatgaaggcggcgtgcaccgtgtgcagcgcgttcccgctacggaaacgcaggggcgcatccatacttccaccgccaccgtggccgtcatgccggaagcggaggaagtggacatagaaatccgcccggaagatctccgcatcgaagtatgccgttccggcggagccggaggccagcatgtgaacaaaacggaatccgccgttcagatatggcacatacccacgggcgtttatgtccggtgcgaggaagaacgcagccagatgaaaaaccgagaaaaaggcatgaaaatcctgcgcgccaagctctttgaagccaaaaaacgggaagaggcggaaaaatactccgccgcgcgccgcaatctcatcggctccggcggccgtgaagaaaagatacgcacatacaacttcccgcagaaccgtctgacagaccaccgcatcggctacacttcccacaatctggacggtatcctgatggggcagctggaagacctgattatggccctccagcatgcggaaatgcaggaacgcctggcggaggccggaatgtcctaacttcctttttcctttcatgaaaactttactggaagtccttcaagccggcacggattatctggcccgccaggggtgcgacgaagcacgcgccaccatgcagcatttgctggcccatgtcctgcactgcaaccgcacggctctttactcccagtttgacaggcccgtggaagaagcggagctggcccccctgcgcgaactgctgaaacgcagggcagcgggagaaccgctgcaacatctgctgggggtcacggaatttttccggagggatttcctgacggatgcccgcgccctgattccccgcccggaaaccgaggaactggtggaaatggtgttaaagaaaatcccgaaccatccggtacgcatcctggacatgggcacgggctccggcgttatcggcgtcacgctggcgctggaactcaaggagcgcgccggggaagtcgtgctggcggacatttccccgcaggctctggatctggccctggaaaatgccatgcggctgggagccagagtctccaccatccagacgaatctgttcgccaacattccccaggaaaaaacggatccgcatgcggaggatgccgattctgctccggtgggagaaaaaggggaaaacgggcggaacatgctctttgacgttatcgtggccaatctgccatacattgcagagggggaaaaacttgccccggaagtcatgaaagacccccatacagccctgttcggaggccctaaaggctgggaaatcattgaacgctttctggcccgcgcccgggattacctgaatgaagacggctttgtagccctggaaatcgggtacgaccaggcatccgtcgtaacgcaaatcatggatggatacggctacaattacattgaagttctgaaggacatgagcggcgtctcccgtttccccttcggctatcgttaatgttatcctccttttcactccatgcaggcggcgcgcattctggttgacggacaaagcgatctggtactggattacggtattcctccggaagcgggagacgtcaagccgggctgccgcgtacaggtgcccctgcgcaacagaacggctaccggaaccgtgcttacgctgtcagaaccggccccggcctggaaggacaggctcaagcccattctgaaactgatcgatccggagcccctgatttccccggtgatgatgaatctggcctcatgggcggcggactattactccgtggctctggatcagatgatccggtgtctgctcccggaaaccgttcgtcaggaaaatacggcggaaaaaatgcgcaaaatggtgtatctggaaaaaactccggcacgggaggaactggacgccctgtaccgcaaagcaccccggcaggcccaaatgctggattatttctcatccgcgaaacaacagtccgcccccctggcggcattcggcgccggagccctgaacgttgcccgcagcctggaagccaaaggcttcatttccctgaaagaagaggccgtgcaccgggaccccagcaccggggagcaattcgtccccacccagcccatgaagctgaacagccagcagcagaaagcgctggaagaaatcacggccatgtgcgcggcagagcgcaaaaaaccggtcctgctgcaaggggttaccggttccggcaagacggaggtttacttacaggccgtttcccaaatagtaaaatccggaaaatccgccctgatcatggtgccggaaatttccctgacgccccagacggttcagcgtttcaaatcccgtttcgcagaactgccttcctccgtggcagtgctgcacagcctcctctcggacggggagcgctttgacgaatggcatgccatccgttccggaaaagcccgcatcgtcatcggtccccgttccgccgtcttcgcccccctccaaaatctgggcctggtgattgtggatgaagaacacgacgcctcttacaaacaggaaagctccccccgctaccacgggcgggatctggccgtgctgcgcgcccatctggaaaattgcgccgtgcttcttggctctgccactccctccctggaaagcatccataacgccctgacaggaaaatattccctggtaaaactgacggaaagggcggacggccagcagctcccgctcattcgcatcctggacatgaaaacggaaggaaggaacaaatccggtcccaacgttatctccgaacgcctcaggatgtccattgaccggcgtctcgacaagggggaacaggtcatcctgctgctcaacaggcgcggattcgcacgctccatccaatgcccggactgcggccacgtagtcacgtgcctgcactgctccctgcccctgacctaccaccgtacggaagaccgcctcatgtgccacctgtgcggattcaaagccctcccgccccgttcctgcccggaatgccggtccgccaacatcctgctccaggggtacggaacccagaaggtggaggaactcctgcgccgcactttccctgcggcgcgcatcacgcgcgtggatgcggacgtggcccggcgaaaaaacgccgtccggaccattctgaaccagtttcgcgcccataagatagatattctcctgggcacccaaatgatcgccaaaggtttggattttcccaacgtgacgctggtaggcgtactgaacgcggacctggggctccacatcccggatccccgtgcaggggaacgcactttccagctcctgacgcaggtagcgggccgcgccggccgcggagatctttccggagaagtcattatccagacttttacgccccagtccccctccctgcaatacgcccggcatcatgacacggacggctttgcagcccaggaactggaaatgcggcgtactttcgacctcccccccttcacccatatcgccgtattgaccatacgttcccagcatgaaagcatggcggaattcgccacgcaaaccctcgcggcccgcctgcgcggcatgcttccccctcccgccacgatgactgaacccatgcctgcccccatcccccgtgcgcacggacagttcagattccagattacggtcaaggggccatccgcccgcatcctctcccgcactctccggaaactggtgcaggaagccggcctgggggaagacctgacggctgtcattgatgtggatgccatgtcattcatgtaagccgccttgccaaaaccggccgggaacattagacttccggcacaacacaacttactattatgctgcttcacttctacaagatgacgggtgccggcaacgactttgtcatggtggacaatcgtgacctgagcctttcctccgtgctggacaaagaaaccatagaagccctgtgtgaccgccgcttcggcattggggctgacgggttgatcgccgtagaaccctcccagggcaaggggggaattgttcgtatgcgttattacaatgcggacggcggagaggcggaaatgtgcggcaatggtgcccgctgcttcggcaactttgccgccgccctgcttcatcacgacaagacagccccccttccttttgaaaccatggccggcgtcgtcaccgcaacctttgaaaaagacggcaatgtcaccgtaaacctgaccaatccccactccatgcagctcttcgtgctgaatgccgatccgactgtgggggcggatgtccattttctgaacacgggcgttccccatgccgttgcgtttctggacaagctggaggacctgaacatttccaggctgggagcctatctgcgttatcatgaggccttttcacccaaaggcaccaatgccaacttcgccagaatcctgtctccggggcacattgccatacgtacttacgaacgcggcgtagaggatgaaacgcttgcctgcggaacgggaatgaccgcctgtgcgttgctgcatgccgtattggcggacgccccctcccccattcaggtggacgtggcgggcggagacacgcttaaagtcggattccaacgcacaggggaccgttttactgacgtcacgctgaccggaccggcagaccttgtgttcaccggagacattcagatctaaacagcttcgacctgaaaaggcggactccttcccatcagggaaattatctgttcagcagggaacattccgcccgcacataaccgccgtaattattgcagaacgccttgtacacggcagggcccatattcgtttcgcaatagtactttacggtaatacagccgttttcgcgttccatattaagaaaacggctggacagcagtaccagattgctctggtaattccacaaagccatgtcacgctccatttcctcatgaatcctgtcgcatataaagctctccggaggaggaaacagaatggcgcagacaacaccgatcagacagattcccggaatgacccctacggcaagaaccccgtgacatttcctgatcaggggaaggtgattcctgaatttccggaaaatggtaaaacggaataaataacccgccagcaacgccaccgggaagaacacattcacgtactcaaaagccaggctcattcctccaagaacgaaaaaaccgatgcccttccacaccttccggtaaacaggaatgcaggcacaaagaaacacgtacagaagatatcccagcaggcaaaggaaaggcagaagcgttcccgtaaaaatatgctccaccatgcagtcccacggatattccctgctgggagcgaaggcttcatggaaaaacatgcataccatgctcaaaagcaccagcacggcaaggaggatggtctttactttttttgactcgtacaaaagccacagcaaaacaactccgaacggcaataaatagcaacctatactgttgaatacagtggacaacatgggaatatgaggaaagaaattcatggagcggatacggataaatgagcggttaacaactaaaatgcagtagcggcttcagcaacagtaattggaaacaaaataaattcaaacactcgttttcaaataacccataaaaaatcatattcttttcacgaaaagccgttcagccgggctctcccacttgacaaaacaaccctctgaaaaggatagtaacgctcttgtgaaacactcccttttcatccaggccgtcctccttccggttctcttctgccttccccaatgcagccgcaaaccgctccttccggaatatacgcctctgtgttccggaatggtgccgggagaacacactgcccaccgggccctccgggcacgggaaaacagaatctaccgggtcgatccgaaaggcggcgtatattacatcaattcccataataaaaaagtttacatcaaatccaggagggtgcaatagaagaccacacggtttctccgtaattttccaaatgggaaacaaataaccgtcctatcatgtttttattgtataattgagaaaatattccgttcaaaaaacttattaaactcattttcttcttgccaaaatggaagaggacgggtaatgtctgccgcaccacaacactaaatggtgtcggtagttcaatggtagagccccagattgtgattctggttgttgcgggttcgagccccgtccgacaccccatcccctttccttcataaaaagagcacttatagtgctcttttttactatccccagccctttccgcatgcgtaatccagaattcgtcaaagccgctttttccgctattgccccgcgctatgtggctaccaaccatgtgctgagcatgggtgtggatctgctatggcgccagcgcgtcgttcagcttgtctccgaatggaaaccggaaaaccttctggatctggcgactggaacgggagacctggccctggccatcctgaacgcaatgccggaaatccgcctcaccgggtccgacttctgccagcccatgctggacatagcggccaggcggggactggatcatctggtttgcgcagacgccatgaacctgcccttcccctccgcctcctatgatgcggtcactgtcgcctttggcctgaggaacatggccagctatccggacgccctgcgggaaatgggccgtatgctgcgtccggggggccatctgctcattctggatttttccctgcctgaaagcctgttgaaaagcccttaccggttttatctgcaccgcatccttcccgtcatcgcagggtggatgaccggccaccgggaagcatacgactacctggcggacagcattgaagccttcccctgcgggcaggccatgaaggctctgctgcgggaatgcggctacagcaacatcacggcggaagctctgaacgggggaattgccagcatttacacagcccagcgatgagtgcgggggacgcaagagaaggcatcatacgcggcaaggcggcacgcgcccgcctgggcggaaaacttgccggactatccctgccccggcaaatcgccgtgattgctttctggccattcctggaacagctgctgagctttttcgtcacctcgtccgaccttttcatcgccactaaaataggggtggacgcccaggacaccatcaacatctctgacggcatgggcgccgtcgtcttcatcatgtggttcggcttcgtcatccaggggtctatcatgatgggagccacagccatcgtttcccgcatgacgggcgccagggactatccccaggcccagcatggcctgcaccaggccgccatgctggggctcctggcaggaaccatctcctgcggacttctcttcacatgcagcgatttcatggtcacgcacgtactgaccatgaatgaaaccgcccgggcctacgccctgcaatacgtttatatggccgcatttgcggccccgttcagcggcgtggtctttgccatcaatgccgccctgcgaggctccggagacacgcggcttcccttctggatcatgatgagcgtaggcatcctcaatgtcatcttcagcgtcatcttcgtctttgcggacgctcctctgggcggctggcgcatcggaggaattgcggcaggaacggtctgcggctacggcatcagcatgtgcatcctgctgttcatcatgctgcggcgcagaaaaaaaatcttcacgggcaggaaaaatgaatccctggaagaacttgtccgggaacggggagaacactatgccccgcccctgtacctcagcttttcccatctgcggccggacatgggcatgcagaagcgaatcctgaaaatcgggctgccgcaggccgtggaagtcttcggcatgtggggcatccagatgttctgcctttccatcatcagtgaactgcctgttaaaggcgtgctgggcgtccacaatattgccgtccgcattgaatcgctcagcttcctgcccggcttcgccatcggcatggccgcttccacgctcgtggggcaatacctgggcgcccggaacgcgcttatggcccgcatcaccatctggaaatgcatgcggtacgccgtcatcttcatgacaggcctgggagtgctcttcagtgcctttcccgccctgttcatggagatattttccaacggcagcacgaccctcattgataccggaatccccgtgttgcgcaccatgttggtggtggaacccttcttcgccgcctgcatcgtgatgaaaatgtccctgcgcggcgcgggagacacccggagagtcatgcttatttcctacggcattatgggctttttccgggtcgtctgcacctgggtatggttcaggctggcaccggaaaccatgactttgtggggcatctggctggttttcgcctttgaaatggccgttcaatccgccatcctctataaaatcgtcaaggggcggagctggacgaagctgcaagtctgaacctttctccggcctctcccgcctcccggcccattcgcaaatccaaaacgtttactgcaggataaaaactttgctttcctcctccaattctgctagcatcctttcacgttgttctgcaacgggctcgtagctcagcggttagagcaggggactcataatcccttggtcgtaggttcgaaccctaccgggcctaccaaaataagcccttataagtaaataacttatgagggctttcttttataaaaatccttcggtgagaattcgctaaaatcgtgtaaaaacgtgcgaaagcgtgagaaaagttacaccacttttgcaccaccgttttttcatccgctgaatgttccccttccgaaaaatggaataaccatttttctggccagtaaaaacgccccgccgcctttgaagcgtccggggcgttcctggtgtccggggaaagcggttattgcttatcggaaaaagaatcaaacttcctgaccagggcagaaagaaagttgaccgcacgagaaagcagggtaatgactttagcacaccagaaacagccaaggcaggagaaaaccccggaaaacagttcaagaacagcaagggctggactgctttgaaaagtaaacaaggccagtactacacccgcaatcaaggcaattatcccgataccccggaacatatcttcaactattatttccgttaaaggtttttgtgcaaaatttgcctcttgaggttcctttgacgatgaggcccaagcaggatcatataatttttttctgacttcttccaccctgtgacgatccggcagcccttttcctttctgtgatagaatcgttttgaactccgtccattcctgcccgccatcaacacacaccaaagtttccgggctaatcatgccgcaattacattgaacttcgagattttcaaaagaatatgggccttctgtctttccttccgccgtcgcaatataatactgttccatgcctctaatatccaagccggcagcctccgcacaagctcaaaatgaaaaagcaaagggggtagccaaactctacccccttttttgcctgtcccccggctaacaggaacgccccttgcaatagcggttcattggtaaaaatgcccctgcccaaacaggcaggggctcatggaggaagataaaaaatctgcacttaaatccatgttgctacatggtttagcccctttctcaaattttcctgttgtttacctaaactttttaccgcttcatccattaccctaaagcgtttcctcatagatgcctccgtttgttgtgcgttgttatttacttgtttggcaaggttgtaaaagttatttgtcacggcatccataaagcgttctgttgattccccttgcttacgaatggcctgtaacgcttcattgatgccggcgttaatctcggaggcgtcaagcgtattgtcgtctccgcctataccttccaaaagtcgctttttgccaacctcccatgctttttgaacggcctccacccttttttgttgttggggggtgggatgttgtggcatcccttcaaagggggcgttcttgatcaacttttcttgctgtttaacagaatcacgggccgctttcttcatggcagcatctaaagctttttgccgggcctcttcttttttcctggcatcctgtatagctttttcttcttcctgacgttgagcgtttttctgccttgcttctgtatttctctgttgtgctgcatctctggcactttgggccgcattaagtgcgcggcgttccgctagttcctttgtagcctgttcaagatcatcttccgctttatattgtgcttctaaagcttttgtctgttcttccctggctttccttaaagcttcatcattggctttataggcactttcccgtgccgtttcggtagtaatatcataccctgcttcttttaaggcttggtcagaactatccctttgttttcttgctgcatataatttttcccaatcgggcaatgtaatttttcccttctctattttagaaatttctccctcaatttgttttaattcatcccaagaaagaatgggcgtattttctaagacattgagacggctttttatttgatttaatgattcaacggccttgctcaattccttttccacatttgtaacaccactttgcgcggcttcttctgcctccgcccgatgtctggcattggcatccattcttattccttcttgaacgcggtttagctttcgccttgcttccggggtatttggatctccgtatttcccattataaaaatctgtttcaacatcaagcagccgggcatggtcttgttcatcaagaatttttgattgtaagtcaatcaaacgcctttgttcccgtactgcttcccgtaaagcttcaacttcaattttcctattgttggcaattctggacgtaagatcattttctctttgtaaaatagattcattatttagtttcgcccttagctcatttgcttctttaatgagcttgtccatatttttctttttttcctctgcttgcctttcaagttcatcactttccgacttaaaatgattcaccagtgcagtaatgccggcggtaagcccctggagcagcagcaaggccaagcccagcggccccatagccgccttgatagacgttccgaacaggcgaataaatggaattgccccgcggagggaagaagacattcccagaatgcgagcggccgcttccgttacttgcgcggatagtccccggacctggcggcgggtaagttctccggcctttccggccgcggtgatacgtttttccaggtcctgaatatttttcagggcgtccgcctgggccacgttatccccggccttccgggcttcttccaaccgggcaatgtaggtttccaattccgcccgcaattcctcataggacgctgcggcgcggcgattgttggcttccagccgttccacggttgccgcggcctgttgttgcttcctggcctccgctgcagccgccttttccgcggccttgtcggcggcgtccatttccttattgtagccgtcgaggatcttttgaaggttctcgtcaaggttatcgccccacttcgcccccaggtccaaatcagacattttattattgaggacttccgcaacgtcgtcaatctgttcaaatttcttcttgagttcttccgccgtcaatacggctccggtcgcgtcatcaataaacgcttccagtccggggttgtcctggaacgccgcccgcatgcgggagccggcatctgtcatcttatcggcgaattcccccagcttctcattggcgttttcaagggctttgtcataggcggaaaagtcgcctccggcatctatcctgccgagttcttcaatctgctgctttgcctcttcggtgcttttggcgtcaacggagtacttaagcccgacttcaatttcttttttaattgtcctggtgcttgatgatgtttaggtgtttttcttttcccctcccccgtccgattccgggcagggagaggggggcttgattcttttaacggttagagagaagcttcctgtttttcaagtttctggcattcctgtacttgctggaaaagatgatcaggaatttcccctttcgatatggcgagtttgttgaattcatgtttctctttcagtagccgggtatgagatttacgcagcttaaattctttctttgaaagctgaagcatcttctgattatggtaaaattcaatcatgtcgcccataaaccccattataataataggtttataaattccaacttgttctgatgttcgctgaagatcgggcaggacttccttgacctcttttgccgcaagagggttctctttcaaaaaaatcataacgctatcaagatagcttttttggattttcttaaattccaagatgtcctcaatgcttggttcgttattgtttttgttgtttgatatattcatagtatgttttatgtttaggttattattattttatttctgccgccccgaaaggagcatgcaaaatcttgaagggcctccatgcttcccggtagaagtaccaggcccatttttctatcagggctgcagcccgcacttctgacggctcccacacgataggcaagcggtatcttacttcgaaagttcccaggctccccattatggccttgctggtcgtcttccttctggacaggtgaaagggcagttcgtcagggtgtcccacaatcagcagccgggcaaagtcataaccccggaggcggtggcattcccgttcgaacctgtcacgccccgccgtcaggcttcctatcaggtcgccaatgctcttcctctccaccgtgaaccggttttcaaatctggccagggaataatccccgctttgcagcgttccgcgcctggaagggaaatgctgaaaggtgaggggcgtttgctctctgttgtcgatgatgatgaggggcgtttccggggtcatggctgtctctctcgcgcgtgtgtatataggggtcttttttcgcaaaaaatgtgcccaatggcttaactcattgatttatcaatgctaacctgggcgcattcatttgtacccataatgtgcccacaagaaagcaaggctttgattgttaattgtttctgctgaattgttcccataattttcattttgttcccacgttttattttcatattcaatggattatgctattaaaagggattctgattgctctttccttgtagtctaatttggtatttggacggaaaagctgttctttcagccccttcacattcaggagaacttttttcacgttcacgccctcccattccgaacccttgaagatctcgctgattttccggttcttcctggttgcggcaaaataaacgcatttgtccccgtccgccgtcttgcggacatacagtccgtaacgttccagaacggcggattcttccgagacttccgcggaggcggcttctttgacgaactcgcgcagggtgcggcttcctgcaatgggaggggaataccccagcagccattccaggcagcgttccccatcgtcgtcaagaacgcgggcgtaatcgctcccggcggccatgtcggcgcattcctgcatgtcctggggcgtcaagtcgcgtccgctggtgacgaagtgcgcggaggcatacacggtagcaaacatttccgcgcggcggccttcctctccctgttcggacaggtattgccgcaaggcttcaatgttgcggcggatatccggtgcgcggtaaatgatgcgggtgacgtatttacgccccaggttcccggaccggatgacggcggccagttcgttatgacgctggaaaaggggcgcggtttcggaaggctctttcttttccaattccagttcaaaaatacgtgattgctcgctggacttttcaatcatggagcgcacggagaacagaagaaaggcgtttctcatgaggtaggtaacgctctttccgtccgcgccgcccttggtgattcccacgtctccgtccgtggctgtcctcaacagggcaagaatgcgccccatgttggcggttttggcggcgttgtcggaatccgcttcatcgaagatgaccgggcaggaatcgctttcaagcttttgccttaatccggcgtccgtagtttccagccctttgaagtacctggccatatctcccaagagaagctgcacgctttcgcggagggtcgtttttcccgaaccggaaggggcgttgatccatccatgggcgcggaaacggagatacccggataaaatggactgcgtgaccagccccaggcaaagaaaggcgtcttcgccgcgtttccaggagtgcgccccaatgaacgccgcaacggtgttcccttcttcgtccgtcagcatgtcgtcagacggggcaggaaggggcttgccgggcaggtaaagaggttttcccgtccgggcatggtgcacggacaggaaggggcgttcctgttcgttctccgggcaaaagagatagacggcgtttcccgcgtgatagacggcgtttccgtcttcgtcccatacgccgcatttacgtatggcgtcggcgttgaatttccggtttccggttgttgcaatgcaatagtcaagtgccctgtccatgacctggcgaagcgtcagcttgccgtccgggttcaacgtcttctgccaccattccaccggggccagaaagcgcaggttcaccggcgtatgttcacgggggttccagtggaacagctgttccgttcggcgggcgtaataaacaaattgcgccccctgtgttcccagggacagaaaagggggcttttcggcctcttcccgctctttctgcagggcggcggcttcttcgtccatggagcgtgcgccgggggtcaaaggcgtgggggctaggggcgtattcatccttgtgcgagggcgggcgcgttggaggttttcatggaacgcatggacgcaaacaggctttcatacagagcgcgttcaccggcgcatagaagcatgttccgggcgtctttgtaggggggcgtccagtcgcggatgacgcagccggcggcggtcagccgttcccgcagtttggcggcggctccccgtcctgccttgtccgcgtccagggcaagaatgacgttttttccggcaagcgaggcttcccagccggttttgaagcctgacgcgccgggaatggcgatcacggcgggaatagtggcttccaggcttccgcgcccgtcttcgtaggggcggcccgtgcaggggtcaacgtcctgctgataagcttcccggaagcattcaagagcttgccctacggctaagcagtcgctttcaccttccgtgatgatgacaaaccgcttgccatggacggaatcaaggccccagggggccgcggcgttccctatgggccacatgaagcgtatgtcgcgcttgtcgccgtccgtggggttcatggttccacggggtttccattgcccgttttcaagtttcagccaggggttggcgtgtttgtccctccggcgcaatttggccccggtatagcgggtgttcccttcttcgtcttccgccgtgtacaggtataaaagccggttgtccggcgtcgcccccaaaagcccccggcccagttcccgcgccgtatggatcagcatcatgagcggatgaatgccaagttcgcaggccagttccccggcgaggcgttcatccttttgcagcctttcccggcaggcgtcgagttcaaattcatccgttgcggagacaaaacagggagggacagacggaagggcggcggccatggtcagggacgggcgcggcctcacggggcttctacgaaacggcaggggcgttccgtcatcgtccggcggcctcactcctaacacgtcgcagacgccccgcaggatgccgggaaagtcccttttcgtgtctaatccattgatgccggcgtgaaggtcaaagatgtccccgccccggtcgcaggaccagcacttgaaacggccctccccctggtattccgtgacttgcagcttgaaacgcgtatgcgttccgaacgggcacggataaatcatgacgcttccgcgctggtgggtctgtcccagcgtgcgccggcagtattcgttcagggcgtccggggttttcagatccgaaagttcaaatttcatgcaggattattcttgttttccctgcgaacgcatacagaatgcccggcaaggaattgattgatactcggtagtacaacatttccgcgccgtccccatgttggcgcatgaggggcggcaactctttcttgcatttcattttcgcatctccttttgtgtttggaaccagatcattacgtcctccacgcagaaacgtttgattcctccgcgcttcccattgcctatggtaaaatgcggcattccccccttgatttgtgaatcaagggtagtcaggctaattcccaaatatgaggccagttcccggcggttgagaatcggcttggcaactactgattgtgtacttttttttgtaatcatacgttgtgtggtatttttgttcgtcctcgtgcgaagacatttttattaatatacatctttttcttacaattctagtggtataagattttgaaacaaaaaaagaggcttttcgtgctgtggcgtgctgtggcgtaatgtggaaatgaaaaaaagtactgtgtattcttaaaaaaataccccaaacatgcctttttctattgtcataatatcttcgtttgatttgtcatattcctttttactgaacaaatgcgttcctaaaactacaaaacaagcttcctatatttctctctaacattctctaaatgagtatgaagcaaccgggaagcaagttcggaaggcacgggggcggcttccggcgtcgttctgttggtgggaatccgttcaatgtccgcaagaaacagcatggggaacaaggcgcgggggacttggcagacaacgcacaagtcatccggccccggcaagtcgcgcaagccctctttcatcagagctgccgcttccctaagcttgcgggcggcctcgttaaccagggcggcggccgcgttcgctttttcctgcgtttctggaaccgatgaacccatagcggaaatatggatgtctttttcaaggcattcggccagggacgccatgctggttccctgcttcgtccatgtttccagtatgtcctgactggcaaagcccatgcgctgaaaaggtcgctgataaggagcttttacttttttgccgctgggaaaggaaatcagcttccctttctcggcatatccctgaacggccttgctccattcgccggcgtcaggcgttcccgattcctttattgctgtgttcatgtctaagttcgtttgcgatttgttcatagtcttccgcttccaattcaacgttgaatattgctttatctaccaacatttcaatcagttgagccgcgcttacctggcatctttccgccagtctccgcagcttgaaactttgttcatgggaaaggggaatggagcaggtttccctgatgcttgctttccgggcttccgtattgttccccagcgcggcggcaagaagccatatcttcaaagagggttctttcatgggcggtcctcgtgttttctggaatccatgaacaggagaaatttcttcttctccaattcgtcctccatgatgccgataacaatcttccgaagatactcttcacaggatagcccgaacttcttcgcctcttccgtgagggtatgaaggaccggggcgggaagcggtatttccttttgattggcgttcattgttcacctccttccaaggcatggcagacgacaaagccgacggcaagacctgccagggcagaaaggatgaagacggccggcgcgctgcacaacaccgccccggccaggggcagaaccgtatcaaacagcgtttcaaggctcattgttcacctccttcccattccgaacattggagagggttaaggttccccgtcctacaaaattttgcgttaagcctccttagggtagctaccccgtaaatatctttacgcaaccgctttattcttcgcttaatagaactgatacgctcacgctcaacgatgccccatgaatgattttccagaagctttccaagagtgccctcttgcaagaaaaggctttcataaacgttcaaaagaccttcggttttagtatcaaggctcatgccgcttctcctttcccggttgaggattccttcaatgacaggcaagcccgcctcttaagaatgccgtgtaggtaggcttccagcgaaaggcccttttttgcggccttctgcctcaacgcctctatggcttcgaggtcaagctctatcgtaatttgatgttggttcgtcttcatgacaaggaaatcatatatacattgtacatatatgcaatactaaaatatatattttgtattcatgacgtatctacacttgccatattctacaccgcttgttattgtccacctcatggaaaaggcagatataaagcaatggcttaaggccatagggaaaaaccggaaatggttggcgcaacaatgcggaattactattcccactatcaattctatcatgtacggtaaacgtcccattcccaagcaatcaggacgcctcattgaacgcctcatggagcaataccccgccacaggaagcgcccctgccacgtacccaagcgcggcggaaaacgcaatcactctcacggtagatgatgccaccttcgacgcctggaacagggctgccacggcggaaggaaagcttctccgtcagtggtgtgtggacgtcatcaatgaaagcttggacgactaattgccgaacgtacgtagaagcacatgaacaaccacagaggacacggaaaacgagcaaagagtattgacagtattcgcctttttattaaagtgattttactaagtctctcccgggtaagctggtagtcttttgactcgtcagaagctccccgaataatggggggctttttgcacaaatctctgttctatacccgaagccataagctttcattttttcatgcctccttttgaacatagaaaatatacggccaaaaaaatcagaacggcaggtaacattctcaaaaacaaggagaaatactcgcaaaatgaaatcttggaagcttttgatgtccttgttaatttccgagcattgcattatgctcctttgaatacgtttcaggccactttgagagaccgtttgaaaaaggtttccagcaaagcaattgtcgctcaacgcataaaacgcttgcccacgattcttgataaattgcaacgctatccagaaatgcaattggacaggatgcaggatattggaggtattagggccatcgtagatacgatggatgaattgaataagatcagaaacatttacctttcagctaaaagatttcctcatagtctcattgcaaacaaagattatatctcccagcctaaaccatctggatatagaggatatcatcttgtttataaataccataacgaacgcttggggatgcaagaatatgaagggttgcgaattgaactgcagatgagaacgcgactgcaacatatatgggctacagccgtggaaacgttcgatgcttttcttggtgagaaattcaaatcaagtcagggagataatctcttcctcgacttcttcaaatatgtctcaagcgcatttgccatcatcgaaaaacaacctgttcttgttgaacatgcccatcttcaggaggaaactattaaagatattgtaagaaaatacataaaagatctggcaatcttggataaaataaaagcgttctcacgcataacggatattatccccccagataggaaattcaagaccggttacagtatacttattcttgatactcaagataagactgtattgtttcgtccatattcttccacccaaacaagagaggctcttgatagctactacagggaagaaacgagaagcttgaaggagcctagcaggcaagtagttcttgtcaaaacggattccatcaagaaattgaaaaaggcataccccaactattttgctgatttggttgcctttaggaatcgcttggagaaattattgtaattggtaaaatttcaccttgtttaccctaaaaaagagagggtttttgttttctttcggcatcctgaaagcatgaacatctcgaatataccgaatttacccctcttttgcctgttctgtgccgtttcctttcggaaacgatacacaggccgtagcagaaaagaaagagacggcctaaaaacggccttcaaatcattcttcttcctgcatcattttccgggtctcttcaatccggtcctggacggcggcatagatgccgtgcttgcgtatcgtcgggaggacttcttcagttacccacttcttgaacttcttcgcctccggcttgcgggagcggagaatcagagagtaaaggccggattcgttgatgatgagaggtgcgcggcctccgttttgagcaaccccaatactattggggttgatggaatcaatctcttcattctctaaaatagaacggatactgtctgttcgtatttccaaggcctcacagacatccttggcgacaaaccaaggatcgttattgatgatgactgtccggacagaacagccaatcatgaaaaatgtacccataacaggctatttgtacccatttgtacccataaatgcgcccataataatattgataaatgaatgagttatatactatgggtacaaagaaacaaaaaatattcgtatatacgtgcgcgcgcgtagagggaagccatgctttcaaaaatggccctttatctgttccaaaaggcatgctccgcttcccgtatctgtttaagctgttccgggttcaaggtgattttactttcaagtgacgttccaggaatgccggcgacgtcctgccgtatgcgtttgccgaatttttcaggcgcgaaccgggcagcgacttttaaccgggtatcaatggcaagcttcttggcggcaatggaggcagacccgcattgcggatccagggcaagccaggaagcttcgtcggccagttcaaggcattcttcaatcatgatgtccgcccctgctacgcgcgcgcgctggaagatgtcgcgaaactcggcatattcattcacccagcgatagacggaggcgcgcgccggcatggaaggagccttgcaaatattctgcaatgtttcaccgcaggccagtcgggcgcatattgtttcagccagggcgggcgaatagagggacggcctgcccgtttttttcttcccggtcaatgtcttcgttcgtttcctgctggataaaatctaaagcggacggcgcaaaagggaaagcttcttctctgaaatgcgccggatttgcccctgtgcgccccgtggaggggcgtttttccgtggaaacggtacacaatgtggaaaagggggaagcggcctgaaaacgggctttagattatcttccttcctaaatcttttctctaaattttttccaaaaaatatacttttcccaaagatcttgtgctaactgatcatatttatctgcccattcaagccacatctctttagacataccgaatctgcgtaaatcccattcctcttcttgttgaatcagtttatttttatccgcctgttcagtccatcttttttcgcttattcctatttctcgaagctgtttggcgcgctctgcatatttattcgcttgttctcggcactccatccaataaggcactatattttttgcgtttcctcgtacagataattcttgttttttagggcgtcctcttagacgtttaagaggaaatttccatatttcatttgtttctagttttagaataaatttccccttctcttgtttacctaaacgaagcgttatttccctaataatagaatttttccaaccatatggaggttttatttctatgtattctgttcttttgcgaggcaacataaaatacaattcaaaacctaaacaattccgcaaataggaataaccatcttcactatttaaaatatcaatcaatttattatgccgagaatgatgcaatatatatttttttaattctgagggatatggtaattttttattttctcgaaaataattacaaaacaaattacatgtttctcttgaagcaccccgcatccctgattgcgtcttcatccaatttatccggttcttagaaactgatttccctgttttaggaatttttgtttcactcactaatacaaacccacaagaaaccctaatatcaagtgcccatggtgtttcatcccaaacaatttccgcccattcatcattcaatgttacttctccagcggcaatccaccagttcccgccctgttgacgacattccaatgtataacgcagaggctcccgccaaggaaaaggcttaggctttgtcattctccctcctttctcggatagacattaaaccatgcttccgcctcatccttgcgccgggcctgtctgtagtgtttttccatgacagatacggaattaccaagccaagcggaaacccgcggataatcttcatacatggcacacgcataggaagcgaatgaatgccgcaaggcgtcatgcttccattcaacccccatcgctttgagtgcgttaataacacgcctctgcgccccttctcgacgttgcggggtatcacctggcacaatatacccgctagaaggtatgcccgcgttgttagcccattccagccatttttcacacacgtccggcaatggtacaaacctagcgcggcctgtcttggactttccatgatgaacttttaccagattcccttgcctgtctatatcctcccatgttaggcgagatagctcacgcggacgaataccacaaaacgccccaagtgccagccaaggcactgcagaaggaagtgctttctgcgctgtgaagagtatcctattcaactcttccacgctgtaaacttcccggggcggctcgtcttcctgaatgtcgggcaacaggttcgaagggtttcggatgatcacaccccgcttcactagccaattaagaaaaacattcaaatgccgcctataacgggcaatcgtggttttagaaggataaccgcccttccttcctacaatggaatcatgcaaacgttcttctattccctttaatgccacttcatcatcaaaaacagagatgcgggcattctgtcccagtaaagcaatcatggtttcaatctcccttaactctcgtacagtattctccatagctcgctcgctattacgccccttggcttccttgtccttatgggaggcaaattttaagaacatttcactaacagtaggacgtgcttcatcttgcctttcctcccactcaattacttgatgaatcgccttgtccaatgttatggaatttttggacgccatcaaacgtgcttgtctatgcgcgcgccaggcaacaatggcagcacgttccgtaggtgtaagttgaaagtttttcccttcctgttctactagagaggcaatttcatcatacctttgtacggcagccatgcgagaaggaaaagtttctatcttctttttcccggaaagagtattcacaatgcgccagcgcattgcctctccctgccccttggaataggagccaatgcgaatgcctctgatccgtttttccggcttgcatcctccatcattccatataccttttattttgttcatgcgttttctggcgttcccgcttgttggtatgaattgtggtgcttttctgccctaaatatcaagagaaagttgcaccatttttgcaccaccaaattttaatctattgataatcaacaaaaagcaagggcctcataatcccttggtcgtaggttcgaaccctaccgggcctaccagataaccccctgcaagtttttaacttgcagggggtttccttttccagtgcagaagaaaaaggctcctgttgaagacgcctctgcttcccctcctgcatatgacggagcttcaaagcggctgccggcaaattccccggtcggcaagtccatgccgaacacatccccatacaaatacaacaaccatccggaaattctgtggggaatttccgggtagtggaaattcatgcttaaagggagtccacgagggctgccaaatcatcatcatatacgaacttgcattgatctccccgtttcttgaacagttcaaacaggtgcggcatgtccgtatccggaacggagaggcccagcgcactcaggcgcattttcacggcgtgccttccggaatgcttggtcaagggcagttccgtagcgccccagccgatttcctccgggtccatcacttcatacgtgctgcggtttttcagcacgccgtcctggtgaataccggaaccgtgggcaaaggcgttcgcccccactacggccttggaacgaggaacggccaggccgctcatggcggccaccatgcggctggtacgcaccagttcattcgttcgtactccggtccgcacttcggaaaagaaatcccgccgggaatgcagtgccataatgacttcctccaaggcggtatttccggcccgttccccgatgccattgatggttccctctatctgccgcgccccggcccggatggccgccagagagttggccacggccatccccatgtcatcatggcagtggacggacagccgaatgcggtccacattgggaacatgggatttcagataggaaatcaggcggaaatattcctccggcatcgtgaaccccaccgtatccggaatattgatgacggcagcgcccgcgtcaattacagactctacaatctccgccaggaattccggctccgtgcgggaagcgtcctctgcggaaaactgcacttccccgcacaaatcggaagccatggcaacggactttacggccatgttcctgatttgttcccggctttttcccagcttgtatttccggtggatgggggaggtggccaccaccagatggatgcgctcccgttccccggctgccttcaacgcttcatgggcggcggcgatgtccttttccacgcagcgggccagcccgcagacacggcttttttccgtgcgttccgccacggcccggacagctcggaaatcgccgtctgaaataacggggaagcccgcttcaataatatccacgcccagcgtttccagctgcatggccacctgtattttctgctccacgttcatcgccgcgccggggcactgttccccgtctctcagcgtcgtatcaaaaatatgtatttgttctttcatttacagtaaaaatgttaagaggtcgttccttcgggaactgcgcacggaaaacgttcctgttacggaatcattcctttggtgcaaatcaagacagccgtttacttccctcgcgccggaacggctcaccggcgcatatcaagatatcttcacggacttaccgtccgagaagcagcaatagacgaccttgcagaaacagggtattcatcttgcttgtttttactataaatccaccctgaatggggaacgggacagacaatgctctttaaaacctgctctgtcaagacacctcaagtacatatgacattgttagagccgtctcttccattgagattttgaaagagagtgccttccttcacaaaaaaactgcccagctgaattaaatcagctgggcagaacatcttttttatccgtttctcccaataagtttcaatccacgcacctgtaaaggtacgatatcgtccatctgaaaacactgcagagaccattatctgattcacccacttataaaagtacggctatattgtaacagataatctgagcgcataaaaagagaaactctctccagacgggtgggaattatgattagaattttcgaaattgtcaacctcgccgacaaaaaattttcttattaggagatacggatgaattattgacagaaatccgaattcctgttaataaagctccgcgggaacaaaaaagagcaaggtaccaccataccttactcttttcttcctgaatataacctcatatagaggctgacatcagagttactacacagcaaccgccttataaaggttcattatgatgatgtcaaatcaagaagcaaaggcaatccattacaatgacgaccaaaccctatatttatcggtatcttataccagcaatagcaacaatttacttaatcgtggcaccaaacgggggggtctatatccaaaatattgtgcatgattctgttaaacaaggttatattgtacggataaacatagaactccaataactggaactcattcctgaaatcagttccagatgagaaaattatgtgaacccaaactggataatacgtctaataacaatctattaagattaccataggataaggtttgacacattattcacaactcaacggcctattgctattcacagcaataggccgttttctacatttcccggtgggaacgtatttcctgaatggaaatggacagggaggcgcggccgcggtacacgttgcggtcaatcgtgaaagcgatatcccagggaggattgggaagctcccgttccgctccgttgaagaaaatagcgtcacgctccacgatgccctggcgcatgaaaagcttcagatgattggttcccacgcgcttgggcggttccgtgggaaaaacgtcggaactcatgaagagaggctgtggattggagttgccgaaaggttccagcttttcatagctgtccagcaaatccagcgtcaacgcctggaaggacacttccatgtctatgttgagcacggggctgcgctgttcctccgtcgtggtttcagacacataacggttgaatgcccggcggaaatcgtccatgcgggattcttcaatcaccagccccgccgccatgtcatggccgccgccggaaaccagcgtatccgcacaatggtgaatggcctgcaccagggacacgccgggaatggaacggccggagccctttcccacgccgctttcgtcaaaggcgatgacgaaggtcggcttgtggtaccgcctcatcagctgggaggctacaatgcccaccacgccgggatgccacgcgcgagaacccagtacaatgacgttgtccctctccgggtcaaaggagttatgaagcatttccaccgcatccgtccggatggcctcctcttcctcctgccgcttgcggttgtgggaatccagcatttgggcaagctgcacggccctcctggcatccatggtcagcaggagttccaacgcatccatgggggaatccatgcgcccggcggcattgatgcgcgggcctatcctgaaccccacgtgggcggcgttcaggaaacccgcgtggttgacggagtcggaagggcggatgcccgctatttccgtcagggttttgaggcccgtatggcggctgtgcgccagcctgcccaggccgtggcgaaccagaatcctgttttccgccaccaggggaacaatgtccgccacggttgccacggccaccaggtccagataaagtttcaggtcaaaggttttcagtttccgctccttcagcagggcatgcgccagcttgaagactacgcccgcgctgcacagataagtatatgggctgttttcctcaattttggcattgaccaccgccgctgcatccggacgccccaaagggcctgcctcatggtggtccagaatgatgacgtctatccccaggctgttaagcatgtccacctccttcacggaggaagtgccgcagtccaccgtaataagcaggctgggagggtccgcacattcgcaaaggcagcgcttgatgccggcctcgctgagtccgtagccttcccgggaacggacgggaataaaatactggggatccaggtcataagccatcaaaatggcccggagaagcgccacggaggtgacaccgtccacatcatagtccccataaatgcacacggtttccccttcatccacggcccggaaaatgcggtgcacggccgccctcatttcccccatcaggaaagggtcgctcaggtgggaaagcctgggatccagaaagagttccgtttccattcccccggtgaagccgcgctgcagcaggagctgcttgaccagcaggggcagttccgcaggaaacgctttcaagaccggatcatcctccttcacggaagggcgtagagtccaatgaaaacccggcgtcatggcagtattttagccccgcatccaacagggtcaaggttgtttccgcaacagaaggccaaagcggagaaaagaagcgtccgcttccgtttccggaaacagtccgcacgccgcgcgcccggccctttcaaaaaaaactccgcccggttcgttccggacggagttcggcgtaaggcgccagcgcctgagacgattatttcctggaggaaaaaatcacttcattaatgattgcatccggctggggagccttgtaggtcaggcgcacggcggaagttccggcaggaatggcaaattcggagaccccgggaccggcgtttctcctgccgaccggcgtccaggtaccctcgccgcggcgcgcctggatggcgaaggcggcggatcccactacgactaccttggaagccctggggttgtccagattgggaacgactacgtccaacggcttatcggcacggtaaaccgttttcaggtttctgtcgctcagggagaccaggctggtgccaggatcagaaggaggaacgtcaaatttaaacatgttcagaacaatgtcctgttccttcccgcttttattgaccagtttcatgcctttgattcccttggggagctgatttcccctggcaatgaagtttttgccctgtttgtccagcttctggaccacgggtttggaggaaccttccacatccagcactacctcagcccaggagttgacgtcatcccgttccaggttgacttccagccaggtggcgttcgtggggccatccaaccgcagggaaataaattctccgggtttcatcttgtgcgtttccattacgcggttaattcgcacgattttgtcggatttctgcacggaaacgccctccagcccagccacgttggaggaagccatagcggaaggaggcgtgttgacggctatttccctcacggcagtccagacggcccgtccgttgcccgttttcttcggctcaatgacgcggtagcgcacggcacggagcaaaaccggcttgggagccttccaggctacctgcattccggcagtctccggccccagcggcttccaggtcttgaggtcgcgggagccttccagctgccctttctctacatagtcaccgtccttgtcgttgcggcccatcagcacttccacgctccgcacgggaatgggcattccgtagtccacgccataccagtctcccggctgaccataagcgccggagtgccagaaggagccgcggtccccgtcacagaagagttccgccttatccatgctgccccccttgaccagaggcttgggggaaagagccggagcgccggcaatggccgggaaaacttttttggagacaatatccgccagttcattgacggcgggggccatcacccgggaaccggtctttaccgcggaacggtacagctgcccttcctggttatggcggcgggaaattccatccatggccgccaaagcctgcgtggcctgcaccaggtgggtcgcggcctctccggcgttgttttcctccagcgccgccacggcatgctggccggcacgccccagttgttcaaaggcgtccacccacgcgccgatttccttcatcagccggggattgtcggccttggcgcggatgacaggtgcagcggaagccatgcgagcgaattcctttttaagcagagccgcatcagccttctctatcctgccttcccgggcggcttccagcacgcgcttgaccacaggttctatttccgcggattcctcacgccggtaaccgtggccgttaggcccctggtcggagttgtggttcacaaaaacctgcatggcttccgccgccttcgggaacaggcgcctgactccctccttccaggattcctccgacttaaagccgttgatattccaggagtagtccgcaagaccgaagagggaaaccttggaggcctccggcttatccatggggttggagacaaatccgcccatggattccctggctcccggttccgtggcaagtccgtacacgcggcccatgcacaggttggaacggcagtagtccgtaacggggaaattccaccagacgtaggaagggcgcttgattctcctgttcacccactgctggccttccagcgtgatgtcatggcagacggaattccccgtccacataacgtggatggaggggtccaggcggtcgcccagaatatccagataagttcccggcttgggattggcccagccgcggttgtactccgtagggcacatgaccaggggagtgacgtctttcttcaccttgacaaattcgtcattgattttgttcagcagaagggcctgcatgtccccccgcttgccctctccgaagatgtcgtcaaaaaacacggcaaaggaacggacgcccagcttgtacatcatctcaaactttttgatgacgttgttcatgtcttcttccgtccacttaatgtctttgccggggtggatggcccagacaaagtccacatggttttccttcgccaccttcaccagttccctgatctgggcggcctggtctgcgggatagggatcccgccagtggggggaggaatggtagggatcgtccttcggcccgtagatgtatgtgttcattttgttctgcccgtaaaagcgcagctggctcagacgggcttcatggctccagggagtgccgtaaaaaccttccaccgttccgcggaattcaatgtccggccaatccgtaatttccccaacgggcaaaatcacgccttctccgccggtcttcgttcccagctgccgcagcgtctgcatggcgtaaaatgccccccgttcgtcatgggctcctatgcccacctttccctgcggagaaatcaccagcttgtaggctccggatttttccggaaccccgtccaacagcttgctcccgcccgccttggcagaacgtattgtcacggaaggcttcccggagaaagcaaccgtctgggaggtgaatttggactgctggggggacggatatacggcaggagtcgccgccagagcggagccggccagaaaggccgccacgctcaagccacattggagaagttgaaaaccattcatgatgatgcgcgataatggaaccagaaaaaactttccacctcaagaaaaaaccgtcctccgccatcaggggaagaacacgggaaaagacttcaagaagaaacttccccgccttctcttccctcttcaggaagatccccccgctcctcatggaatattcgggaactgtcatcactccatcacccggctcatccggagaccgcccggcgcagccgcctccctgcaggaagcggcatgttgatggatttcctgtgaagggcaatcgtcccgcacggaaatcctggtggggctggatgccgggggcgccgccttctcccttcttgaccaaaaattcaccgtaacgctgaaaaacaaaaaagggccgtgcagaatccctgaaaagtcagcgtcatcccatttcagaagacaaatttgaccattgcatcacttgaagggaaggttcatcatgcggaacatgctccggcgcattttgattccttttctgtgtcttctgggcctgttctgctctcttcaggcccaggatgccccagtattgaaaatcgcagctctgcaccccgtcttgggagacatggcccgcgccatcggcggcagccgcgtgcaggtggcggacctgctgcgccccaacggcaacctgcacagctttgaaccctcgccgcaggacattgccgccgcaggacgggcgcgcctggtgctggcctccggcaaaaacctggagccgtaccttcccaaattaaaggacgccctgggaggcagcgcgcaaattctggatctcggagcctccgttccggatgttcccgtggaggaagacaccgcagaccatgaccacgaacacgacggagactgctgcgcccacggtcccaacgatccccactggtggcacacaccggccaatatgaaacgcgccgcccgcaccctggccgcaacgctcacgcggctggaccggatatgaacaggactataaagccggcctgtcccggtggaacagaaagatggatcagctttcctcctgggccagaaaggaacttgcggacattccggaaacggaccgcgtcctggttacggggcatgcggccatgaaccatttctgcagggaattcggcttccgcagcatcagcatccaggggataagccgtgaagatgaaggcaactccgcccagctggcctccacgctgaaaaagctgaggtcagccggggtaaaagccctgttcccggaatattcctccaaccccaagagccttacggaaatcgccaaatccctgaacatccccgttgccagaccaatcaataccgacgggctggcccctgagggacacacgttcgaatccatgttcagacaaaacacaggcatcatcaaggaagccctttccccgtcccccaggccatgaccagcacacccctgcggcagttttttcccactctgggagtcgtcatcctgctgggattcttcctctacaacatgacggcacctaccaccggatcacaggaagcggagcattccgcccccacggcgcaaaccgcggatgttcccacggtcatcacggtcagatgcgcccaccgtccggaagccctttccatctcctgcggcggccgtcttctctggcagcccgaaacgcccgggctgcacgaagaaacggaatgcggcctgccgttgaacaacggttccgtaacgcttaccgtttccgcccgctggccggaaaacacgccggacacccccgtcacgctggaactggaaccggaggggaaaaccaccgtctccgccacccgctggtccttcggcccctccctgaacgacagctactccttctcatggaaatgaacagcccagcccctccctgcacccagaaccacatctgctggggcgcgcacgccagccacccggaccgtcaccgactggaagtggacagcctcagcgtttattatggaagccttctcgcgctcaacggcatcagcttttccatcacctgcggccacacgctggctctgatgggtcccaacggtgcaggaaaatccacgctgatcaaggctctggccgggctgatccgccccgattccgggaaaatcctgtggaacggatgccccctgcacgacacgccgggagaaatagcctacctgccccagcgttccgacgtagactggtctttccccatcaccgtccgcgcgctggtggaaatgggccgctatccgtccctgggcctgtggaaaaaattcgggaggcatgaccgggatattgtggaaaaatcccttcacgttcttggtatggaatccctggcggaccgccagatttcagaactctccggcggccagcagcagcgggcctttctggctcgggccctggcgcaggaggcccatgtcctcctgctggacgaacccttcacgggcctggacgcccccgccagccaatccctggggaggcttctggattccctggcggcggaagggcggctggtcatcgcctcccaccacgacctgaacacggcggcagacatcttcgacaccatcctgctgatgaacagggagctggccgccttcggcaccccgaaggaagtgcttacccccgcacgcatccgggagacatacggaatggaacctcaaccggaaatccaagcttcatgatggatgattttctccaattcctccgcgaacccatcgctcagcggtccctgctggcctgcgtcatgattggcttcgccaacggtttcgtcagcgggctggttatcctgaaaaaatccgcccttcaaatcggcacgctctcctgtgccctgttgccgggcattgcggtggcggtgctcctcttcggccttacccgttggagtttgctgacgggggcggtggtggccgccctgctggtgggcctggggtccctcttcgtttcccgcacatcccggctgaaccaggatacagccctctccatcctgcataccacggccttcgctgcgggcttcatcgtgctggtaaggctgggcctgcaacagaaaattgacgactggctgttcggctccatcatgagcctgtccgactccgacctgtggatcgccttcgccatcagctccgtcagcgtcctgatcctgctgctcttccgccgccccatcctggtctgcctttttgacccggacatcgccactacgctgggaatcccctcccgcctcatcagttacggcatcttcaccctgatcattctggtgctcgtttcctctctgcaggccgtgggagcgttcctgacgctggggctgcttgtcgatcccgccgccacggtgtacctgcttaccaacaagccgtcccatctcttctgggggggaggaatcatcggaggactgggctccctgctggctttttacctgtccttccccctgggctggcatctgggtgcaaccatcattctggtgctgggcattattttttgcacagcctatttgtattcatcacggtgcgggcttttaaaacagcacggaaagaattcgtccaaagtacaataacaaagcccgctttcatgacaatccatgacacgcagactactagtccgccacagggagcgccattataatgcgggttgtgaaaaaatgtgagatatgctctgcaccggcaacggtgttcctgacacagatcatcaacgggaagtccaccaaattctgcctttgcgccaaatgcgcccaggagcggggtctgctggacccggatgcctttgatctggcggagaaactgttcccgaatcttcagggccaattcggcaaggaaggcgcggcggggcccgccgctcccattccggccctgcaatccctgcccctcacaagctgtccgatctgctccttcacccttcaggattacaaaaacgtaggacgcctgggctgcagtgaatgctacaacgtctttgaagaagaaatcctccctcttcttacccagatccagcctgattcccaccatcacgggaaaacgccggaacgggccgaaaaacgcgaaacggaaacccataccatcagcgatctggaacaacagctttccctggcagtggcaagagaggattatgaacgcgccgccaaactccgcgatcaaatcaaacaattgcgcacgccgaccaattaacatacatgctctttgacgacttactcaacaaccccgccaaatggatggtggaatcaagggatgagcacgacatcgtcctcacctcccgcatccgcctggcacgcaacctgaccgccaccccctttcccggctgggccacacgccagcagagggaggaaacgctgaagctcacttccggagaagcgcgccaaatccccgtcatgaagggaggctattatgcggagctctccggacttacccagcagcagaaacagttgctggtggaacgccacctcatttcccgggaactggcggcgcgttcggaaggctgcgccgtcctcatctcccgcagccagaatgccagcatcctctttaatgaggaggaccatctgcgcctgcagtatatcctgcccggcatccagcttaaaaaagcatggggggccatctccaaaatagactccgaactggaggccaggctcccatacgcctacaatacgcggctgggctacattaccgcctgtcccaccaacctgggcacgggcatgagggcctccgtgatgatgcatctgccgggcctcgtcatctccgaacagatgcagcaggtcgttcaggcggccgcgcagctcaacattaccgtccgcggcctttacggggaagggacggaagccaccggcaaccttttccagatatccaaccagtccacgctgggggacagtgaagaccagattgtggaacgcatgacccgcttcacctccgacctggcccatcaggaatggaacgcacgcaggcggctgctccagtcatcttccctgcaggtgaaggaccgcgtttcccgcgcctacggccttctgaccaatgccactctgctttccacgcaggaggcgctggccctgctctccttcctccggatgggagcgtctctggacatcttttcccaccaggcattaaaaaacgtcaataaaaccatcatgaacatccagccggcccatctggcccgcctgtccaccacggatcaaaccactccggaacacagggaccagatccgcgctgatattattcggaaagaactttccggcaactaatgcaaccaaacaatttttttgaccatccatgaataattttacgcctagggcgcaacaagtgctggcgcatgcgcgccgggaagcggaccgcttcaatcatcattacataggaaccgaacaccttctgctcggcctgctcaagctgggcaagggcgtggccgtcaccatcctggaaaatctgggcgtggagcttaccgccgtgcgcaaacaggtggaggaacaaataggccggggcacggaaccccaggcggagggcaacatcccgtacacccccagggtgcgcaaagtcctggcaatggcaaacagggaagcccaggaactcaaccacacgtatgtgggcacggaacacctgctcctgggcctcatccgtgacggcgacggcgtggccggacagattctgcgccacttcggcgtggatttggaacaggcgcggcgcgaactgctggacgtgctgacccccaaataccagatggatgcggatgaagacaacatcatcccggacgacgatgacgacgaggaggaaaatgaatcccccgccatcccgacggacgagccttcctccccctcctactccaggcagcagaaatccaagacccccgcgctccaggcctttggccgggacatgacccagctggcccgggacggcaagctggatcccgtcatcggccgcgcctcggaaattgagcgcgtcatccagattctgtgccggaggaacaaaaacaaccccgtcctgctcggtgaagccggggtgggcaaaaccgccatcgtggaagggctggcccaggaaatagcccagggccatgttccggagctcctgcgcagcaagagggtcatctccctggacctggcgctgatggtggccggcaccaaataccgcggccagtttgaggaacggctcaaggccgtaatggatgaaatacgccgggaaggcaatgtcatccttttcattgatgaactgcacaccattgtaggcgccggctccgcggaaggctccatggacgcctccaacatcatcaagcccgccctctcccggggtgagctccaggccataggcgccaccacgctcaacgaatacaggaaacacattgagaaggacgccgccctggaacgccgcttccagcaggtgcaggtaggggaaccctccgtggaggacaccatccagattcttgccggcatccagcccaagtatgaggaacatcacaaggtgcattatacgaaggaagccgttgaagccgcagccaagctctcccaccgctatttgacgggccggttcctgccggacaaggccattgacatcctggatgaagcgggcgcgcgcaagcgcgtctcccagatgacccgcccggaccacatcagcaacatggaaatccgcattgcggaaatcaaggaacgcaaggacaaggctgtggaaacccagctttttgaagaagcagcccgcctgcgcgacgaggaaaaacaagccaaggcggaacttcagaacatgctggaaacctggcgcaactcctatgagaccaactacgttcccgtgacggatgaagacgtgatgagcgtactcgccaaatggacgggcatcccgctggcccggatggaggaaaaggaaaccaccaagcttctgcggatggaggaagagttgaaaagcaaagtcatcggccaggacgaggcggcttccgccatcgcccgcgctctgcggcgcagccgtgcggatatcaaggatccgcgccgcccgatcggctcattcctcttcctgggccccaccggcgtgggcaaaacctatctggcccgcaatctggcggaaatcatgttcggcacctcggacgccctgattcaggtggacatgagcgagtacatggaaaaacacaccacgtcccgtctcatcggttctcctcccggctacgtaggccatgacgaaggcggacagctcacggaagccgtccggcgcaggccctactccgtcatcctctttgatgaagtggaaaaggcccatccggacgtcatgaacctgcttctccagattttggaagaaggcagcgtaacagactcgctgggacgcaagatcaacttccgcaacaccatcatcatcctgacctccaatgtgggggccgcttccgccaaacggcagagcaccatgggcttcggcgccatggccgccgacaacgcggactacgccgccatgaaggaaaagattctggaagcggcgcgcaagcaattccggccggaattcctgaaccgatttgatgacatttctgtcttccgcatgctggaacgggacgacctggaacgcatcgtgcatctggaagcggacaagctcatctcccgtctcaagaccaagaatatcacgcttgccctgagccaggaagctctgagcctgatcatcaagaacggatatgacccgcagtacggcgcccgcccgatgcgccgcgccatcgaacgcctgctggaagacccgctggcggaatccctgctgaggggagacgtgaaacccggcgataaaattgaagccgtggaaacggacgggacggagacgctcaccttcctgcacatcaaggacaaaaaaccagccaggcccaaagcgccgcgcaagagaacgccgcggaaacccaaggcggaataaacgcttttaggcttttcaaccagggcccctgcatgttgacatgcaggggccttttcattgggccggattccgcggaactgccatttccatcccctgaaaggacaatgaccctccccgcgtatttacgggcatggtctcctcctttcccagaattctgatctttctgatgatggcaagcctgcatgtattcgcggaagacatgcagaaaaacagggaacgggaagccgcccgctcagtcatcatgcggaccgtgccgtctctggccgcctccccggaaaaactgcacctggaaaccattgaaaaagaagacggatatgatgttttcgagacgaaagcctctggaggagtgctgacgatccggggaagcagcggcacagccctttgccggggattctatgattttctgaaaacgaaccgtctgggaatggtatcctgggaaaacaaggacattcgctggccggcacagctgccggacaccgcgccgcgccgcatcgtttctcctttccgcaaccactattatttcaatgtggtcacctatggatacacgatgccctactggacctgggaacgctgggaaaaggaaatagactggatggctctgcacggcatcaacatgcccctggctctggttgccacggaggggatcgccgtccgggtctggaagcaactggggctgacggaaaaagaaatagaagaattttacacggggccggcccatcttccctggcagcggatgggaaacatcgtcaatcatgacggcacccttcccgccagctggcacaaggaacaaatcgccctgcagcaccgcattctccacaggatgaaatccctgggcatgtcccccatctgccccgctttttccggtttcgttccccggggaatcctccgcctttatccggaagcgaagcttcaccggctgggctggggaggctggccccaaaaaaaccatgcccattttctttctccggaagagcctctgttcctcaaaataggacgcctgtacatgcaggaatggcagaaggaattcgggaaaaacacctattttctcgcagactccttcaatgaaatggaactccctgcaaacaaaggaggcattgaagcccgcaacagcatgctcagctcccttggggaacaaatctaccgctccatttcctctgacaatccggacgcggtatgggtgatgcagggctggatgttcggataccagcgcaacatctggaacgcagatactctgaaggccttgctcagcagggttccggacgataaaatgctccttctggacctggcggcggattacaacaaaaccttctggcgcaacggcatgaactgggacgttttcaaggggtttttcaataaaccgtgggtttacagcgtggttcccaacatgggcggcaaatgcgccatgaccggagtaatggatttttacgccaacggccacctggaagccttgaactctccggccagggggcgtctttcaggaatgggcatggccccggaaggaatagaaaataacgatgtgatctacgaactgatcacggatgccgcatggaggaaccgccaggaaaacgtggaacaatatctggaaaattattgccgggccagatacggaaattatccggataccctgaaggaagcctggaggctgttccgctgtacggcttactccaacctaaaagatcatccccgtttcaactggcaaatgaaacccggcacccgaaactgttccgttgacacaagtgaagactttctccggggactctccctgttcgtcaacacccgcggcctggaacaatcccccctgttccgccaggatgccgttgagatggcagcccattatcttggcatacgcatgaatgaagccatccgggccgcccaggaagctctggacgaacaggatcaggaaaacgcggaaaaatgcatggcctatttccgcaaatacgcccttctggcagattcccttctggaagggcaccccacatggaggctgtcgcgctggatatcgtttgcccggtctcacggaacttctccggaggaaaaagacgaatatgaaaaaaacgccagacggctggtgaccaggtgggggcctcccatagacgactacgccgccagaatatggagcggccttattcgggactattacctgccgcgctgggaacatttcatgcaaagccggctttccgacaaaaatccggatatgggtgcatgggaggaaaaatgggtccgttccactggcgtaagcgccgcacatgcgccagaggatttgcttcaagcctgccgccaggccgtccgggaggcgccccctcttccttcttccctgaaaagaaaagcaggcggatcaattataggaacctggacgtccgcgacggtagccgcagaatggagttacctggagtggcccgtttcttccgccgatcttgaaaaactccgcggagtacggttcattttcacttccggaaaccatgctctggaaatagaaggcgtcgaactcctggaaaacggcaaagtgatcgcccgcgaccagcatgccggattggcaggcaagacttcccatggaaatttctatcagctttcccttcccaaggggattcatgccaacaacggatgctccctcagagccagggtccgctccatgggaggaaaatcttccaatgggaaattggaactggttaaagaatgaacagcttcaatctcatttgcttacggcttgttcctcattgattccgtgccttttacgttagaaaaatccgccgtccgaatcaggaggcggcatggccggcgcctcccggaatccccgttcggcccaaccgggccgaaagctacatttcaaaccggtgcaggttttccacatgggaataacccatcttcctgagcgcttccagcgccttgtccgctctctttcccgtacggcaatacagcataatcacggcgttcttatcgggaagaagccggggggccagttgttccacctcatctgccggaatattcaaggcgccctccttatgtcccgtgcggtactcatccagagtccggacatccaccagcacaacaggacgcgcggcggcgccttccggagacacaaccatggcggaggaagcagggtcacgttccgcattcctgcctttcagccaaacgaagagggccgtcagcccggtcaccatgaccacgtacaaaaccacatttttcacgcggccacttcactaaaccgcggcgaagtaatcaagagaaaacaacgccctgcccacatgcgcaggcgtcatttgccgcccacgcagcaccggcggctccgttccacgggaaaacaatgcgccggatacagaagaaatacgcagaagcgggaagggacagaactttcccttccccccctccacattcaacaaggccggagaaccattcccctacccctcatcatcaatcaccactgcctgggaagcgaagccaaaagcggggcttccccattccaccacatccccgggtttcaaatataccggaggcttcatccccatccccacgcctcccggagtgccggtggaaaccacatctccgggccataaggtcatgaaccgggaaacataggcaatcagacgcggaacaggccagatcaagccgtccgtattgccactctggcgcacttccccgttcactttcaattccagaggaataccggagccgtccccaagttcatcagcggaaatgaacgtgggccccatcggggcaaagctgtcatagctcttccccttgatccactgcccgccatgttccagctggttggccctttccgaatagtcgcacatcagggtatagccgctgatagcccgtgcggcctcctccggggaagcgtttttcagcacatccttaatcactacggccaattcaatctcataatccagcttgtcgcagccgggcggatacaaaacaacatcactgcaggaagtaatggcggaaggcgacttcagaaaaacagccggttcctgcacggaatccccgtcaaactccttcgcatggtctgcataactttttcccaggcacaccagcttggaaggggaacagggcagcgcggtatcaatcatccattcagggtcgacagctttggaggcggcactatccagaaacgcggcaatgcgcttcatttcctcttcgcaggaacccgtttctccgcaaatgcaggcatcagcctccgcaagcacggagtccgccgccaggtattccccgcggctttcgctccacagagccataatgcgctccgcctggtcattcaggtaaaatctgatcttcacccttccatcctacaaagctcctccttttaagcaaagagcggttccgtcattcttctctccggcggcccctcttccgccgcccggacgctctgtgaaagcatgcagcgcgtagggcttgcgttaccggagcaaaacattatcatgccattgcttaacatcattaacctatgtccgatcaaatctacttttttgacactaccctgcgcgatggagaacaatgccccggagcatccatgaacctacgcgaaaagctggaagtggcgcgtcaaatggaacggctgggcatggacgtgattgaagccggctttccctgcatctccgacggcgactttgaagccgtgcacaccatcgcccgcgaaatcaaaaaatgccgcatcgctggtctggcccgctgcgtaaaggcggacattgaagcggcggccaaagccctggaacccgccggggaacgtgcccgcatccacattttcctggccaccagcaagctgcacatgcagttcaaactgaaaaaagcggaatccgaaatcctgcgcatggctgcggaaggcgtatcctatgccaaacaatttgtccaggacgtggaattttccccggaggacgcttcccgcacagacctggacttcctgaccaaagtcgtggaaacagtcatcgatgccggcgccactaccgtcaacattccggataccgtgggctacaccacaccggacgagttctaccgcatcatccgccacctgaaggaaaatgtgccgaacatcggcaaagccgtcatctccgtgcattgccacaatgaccttggcctggccgtagccaactccctggcagccgtccgcgccggagcccgccaggtggaaggaaccattaacggcatcggcgaacgcgccggaaacgtggctctggaagaggtcatcatggccctgcgcacccgcgccggacaattcggagacgtcacggacaacatcaacacgaaggaaatcgtccgcacttcccgcatcgtggcccgcatgagcggcatgcaggtgcagcggtccaaagccatcgtgggggaaaacgctttcgcccactcttcaggcatccaccagcacggcatcctcaactgccgggagacctatgaagtcatggacccgcaggcggtcggctggggagccacggaactcccgctcaccaagcattccggacgcgctgccgtcaaatccaggctggaacagctgggccatgtcctcacggaagaggaagtcaacactgtctttgaacgcttcaagaaagtgggcgactccaaaaaattcgtttatgatgatgatctttccgccattgtggacgactccctgcatgcctccaccggcctatgggaactggacttcctgcaattcgtggcaggcagccacgcgcggcccacggctacggtgggactgctcaaggaaggcaagaaatttgaagacagctccacgggcaatggcgccgtggacgccgttatcaaagccattgagcgcatcaccaggcgcaaaggcacgctgaaaggctacagcgtcaacgccgcttccgaagggaaggacgctctgggagaagtcacagtgcatgtggacttcggccagcccaagcccattgtgggcaagggagcctccacagacgtcattgaagcttccgcccgggcctacctgaacgcggtcaaccgttctatccgcatggaaaacatgccccagcccaataatctggatgcaggaaccatctaacacgggaagcgccccgtttgcccgaacggggcgcaactccgcccatcagcctgccagcctctgcggggcttgcttttccattgctcccatgtcataaggttcaagactcttacaccaccccatgaaagcgacattactccttctttgcctggcgtgcagtgcgctggccgcaccgccgacaaaaaaacagccggcccccgttgaaccgctgcccgccctggaaaaaaacaccattgccattgacggccatccggaaagcgttgcagcggatgccgagggcaatatctatttcacctgcatcggctccaggctcacgcctacggaaaaagacaaggacggctacctgggcgtcattccgcacggttccactgagccgaaaaaaatcacggacgtagataccctggacgcgccgaaggggttgctgtatcaggacggcttcctttactgcacggacgtggacatggtattcaaaataaacgccaagaccggcgctattgaaggatacgtggacttgtccccatcccgcatgaaattcctcaatgacctggcgttcatcaatggcaggctcatggtttcctccacggataccaaccagatcttctatgtggacacgaataccagctcttatggggaactggtcaccaaacaacccatctacaaaccgaacggcctggcctgggacccggaaagaaaggtcatttacctctgcgaatacgcaacggatgaaaaaggcaaacccagcggacgcctgctctccattaaccccgtttcccgggaagttacggaactttccaaggaacggggacagtatgacggactggtttaccgtgacaacgccctttactacagtgactgatccaaggataaaaaaccggaagctgtccgcaggctggatctgaagacggggcgttccgccccggtagccaccggccctgttgaaggggcggcggactttatcctgtatgactccatgatggtggttccgggcatgacggaaaagaaaatccacatcatgcccattggcggaaaaaaataaacacggctgttccgcttttattccccttatccgggccgccggctgcattccccgcgctggcggcctttttcaatttacggcttgaagtacacctggggatgcgcttagttaatggagatatgaacacgatttccgaccaaatcatggaggggatgaaaaccgccatgaaagcaaaagactccgttaccctcaataccctgcgcgccctcaagacggctctcacgaacacggccatcgccaagggaggcttgggaacccggctggaagaagcggaagaactggccgtgattcgcaagcaaatcaagcagcgtgaggactctgcggaacaattccgcgccgccggacgcccggaactggcggaaaaggaagaggcagaaatcaccgttctcaagcaattcatgcctgcggaactcacagcagaagaaacggcggccattctggaaaccgtgatgaaggaaacgggagcctctaccaaaaaagatatggggcaggtcatgaaactcatgcaggaacgcactgccggcagagtcaacggcaaggagttggcccgcatggtgtcagccagactgtcatgaaatgctgcgccgccatcatcgttgcggccgggtcctcccggcgtgccggatttgataagctgctggcccccctgcacggcgtcagggtgctggaacgcagcatccgcgcctttgccaactgccgggaaatcacggaaatcgtagtcgtttgcccggaggaacgttttcatgccattaacggcgcaaacctggaaacggaaatacccgttacccgtgtggacggaggggcggaacggcatgaatccgtgcagaacggactggcagccctgctttataccccggaattcgtggccgtgcatgatggagcccgcccgctcattacggtggagcaaatctcccgctgcattcaaaccgccagggaatatggggcgtccgcttccgcacatcccgtaacggacaccctgaagcgtgcggacaaagaacgctttacgcttccggaacaggtggaacgggacgggctgtggtgcatggaaaccccgcaggtctttcaatatcctcttctcctggacgcctatgtggaagtcacggaacggaatattcaggtaacggatgaagtaaccgccctgcaactcatcggccatcctacgcgcctggtgcataatcatgagcccaatcccaaaatcacatggccggaagatatttcccgcgctgaaatgctaatggaactcaagcacctccgcaatgactcatgaccggccttctgtgtaagaatccccgcatcgttctcattctgggaacagggtatctgggaaaagccctggcggaaagcctgcggaaagcgggacatacggccctgacggcggatattgacccgcaaaaagccatttacgaagcagacgttgcagaccaggcctccatgcaggggctggccgcccgcatcccctccccccagatcatcgtcatgtgcgccagcacgaggggaggcggagaggaagcctaccgcaacctttacgctcatggaacgcggaacacgctggaagccttttccggaacgccggtcatcttctgttccagcacagccgtctatggaatcacggacggacgctggattacggaggaacacaacgtctatccctcctccggaaaaaacgggctgcttattcaggcggaacaggcggttctggcagcggggggcacggtcgtccggctgggagccctgtacgggccgggccgctgtgctctcgcctcccagtacgtcacgaaggggaaggccctccccggagccatggacagatggctcaattacatccaccgggacgatgccgcagccgccctgcacctgctctgcaccctgcgggaaccgcctgccggcatttacaacctgacggaccgcacccccatgcaaatgggagaaatatactcctacctttccaatttgctggggaaacccgctccgcagcctgaaccgctcccggcggaagcgcgccggggcttctccaaccagaggatttcctgctcccgccttatggccttgggctgggaaccgctctacccaagctttgcggacggtgtgcacaatgtgctggaggcactggaagagtaattttcacccccatccttttccacgttgaccggccctttccggacgttccatgtgaaagaagcagcaaaccttttgaaaaaacgacggaattgttccccctatccgcaccccttccttccaagcctctctcaaaatttcatgactgccttccccaccctgaaaaacaattattatatccgccgtctggcgcctttcctgattgtatatcttgtttatgaactcattgaagtagccatcctggcctttcttcagcaaacgggaacggactggaactccttaacgctcctccggcttctgggcaacctgctcgtggaaacatgttcctccttcctttaccttatcatcccctaccttctctatctggcggcgctcccaaaagcattccatggcggcaaaacggatcacgtgctcaccacggctttttttacgctcttctgcctgttgaactgctgtgaagaaatggcggaaattctgacccgtgagcacttctctttttactcccggcaattcctgcaatcaccgggacacgcctgggctcaaatagcggagggcgtccccattattcccgcgctacttgctgtcctgacaatttccacagcaacagtcgtcctcttttcaaaaaaactcgtacccctgcagccccctccttccgctccggttcgggcatccgcctccgtccttgcctgcgccatggccttcatcctctcatggggaagcagcggccccctgcccgcctacgggggggaaaatggggaaatagccaaggacggccttttctccttctttggggatctgtttgctgttactacgctcccccatctgccttccatctttggaattcccgtactcatcacgggaagcatcattctcctctttctgctggtggaatatattccggagcggttcatgtccgcaaccttccgcccgtcctttctggcgggcaatctcttccggcgcatgaaaaaacgtctccacctccgttccgattttacactctggctccttttactcctggcagcggtacttctcatccgcctcatcagcatgggagcctaccccctcatggacacgacggaagcacgctatgccgaaatgtcccggaaaatgctggaaacaaaccagtggctcgtcccccagttcgactacggcattcccttttggggcaagccccctctctccttttgggcaagcgctgtcaccatgaaactaggaggcgttaacgaatggagcgcacgcctggcccccttcctggcttccctggccatgggccttctgtttttcgcatggccgttccgctctcaatctgtgcaaaaggcggccgcgtgcttcctggtcctcgccgcatcaggcataggttttgtcgcctcaggagctgtcatgacggatgaatttctggctctgggcatcatgctctccatgatctccttctggaaaacggtggcccaaccctccaagcagccgtggtggaaatacctattttttgtcgggttggccataggcctgatgagcaagggacctcttgccctcgtccttacgggattcccaataacactctggaccgtatggaaccgggaatggaaaaacgtctggaacagtctcccctggataaaaggcgccttgctgatgctggcgctgagccttccctggtatcttctggcggaaaggcaaactcccggctttcttcattacttcattgtgggagaacactttcagcgctttaccgtcaaaggatggcagggagacctgtacggctccggacacgcttctcccctgggaaccatctggctctacggactgaccatgttcctgccctggcccctcctgctccccctcctgcggatgaaaaaaacttctccgttatctgaaaaaactacctttccgggagaaaattccttcctgtggctttgggcgctcagccccctgctcttcttcactctggcccgcaatatccttccggcctatgtgctccccggcatcccggcctggtgcatcctgaccgtacaggggctctggcaatggaacaaccgccgcccgggaatcaaacatcttatcttcctcccagcctccatatttggcatcatggccattttcctgctggggcacggattcgaccaacttgaataccgctgccagaaacagctgctccaggcttgggacgggaaatcccccctgtactattgggacagtgtccgccctccctactccgctcaattctactcatccggaaaagttcagcgactggaaccgggaacgctgcctccggacaacggaacaacctatctggcgatgaaacggacggactatcatcagcaccgttccctcctgtccggatggaagcgggaagcggaagaacggctctggctcctgctttccctccccgccggcccaggcaacggaaaacacgcgccaattcctccctctgaaaattgaagggggaaatgcacttcatgagtccggtacatgccggaaaaaaatccagccggcggccccgcccgtctttgactctcccctttcttgacttgccgggcgcgaacaggcaaaatcccgtgcgcaatgcgtatcatcacaggtcttcaacccagcggcaagctgcatgtcggcaactacttcggagccatggaaccggctgtccgcatgcaggaaagcggggaatctttctacttcctggcggactaccacgccatgagcaccgttcacgacgcaaacacgctgagggaaaactgcagcaacctcgctacggactttctggccgtgggcctggatcccgaaaaatgcgtctttttccgccagtccgctgtgccggaagtcaatgaactggcctggatactcagcaccgtctgtccgatgggcctgctggaacgctgccattcctacaaagataaaatcgccaagggattctcccccagcaacgccctgttcacctaccccgtgctgatggctgccgacatcctgatgtatgactccgacctggtgcccgtaggcaaggaccagaaacagcatctggaagtcacacgcgacctggcgggcaaaatgaacgaacaattcggagaaggcacctgcaaacttccggatgcgctcattgcggaaagcacagccattgttccggggctggacgggcagaaaatgagtaaaagctataataacacgctccctattttcggagaggaaaaagctgtccgcaaactcatcatgagaatccccacggattccactcccgtggaagatcccaaaccgacggaaggttccgtcatcctgcagctttacaaactctttgcctccgcgcagggttatgaagacatggtgcgcggtttccagaacgggggatgcggctatggagacttcaaaaagcgcctctttgacgcttactgggaatacttccggcccgcgcgcgaacgcagggcggaactggaagccaatcaggactatgtacgccggacgctggaagaaggcgcccgcaaggcgcgcgagacggcctctgtagtgctggacagggtgcgccgcgccgtggggctggcctgaaacggaataaaacggaacacccgggaaagccggggcagcacacgtttttttgtggcatggaaaagtacggaatgttatacagaaagatatgaagaatattctggtagctattgatttctccaacgccacggacgccgtcatccaccaaatcggcaaactggcctgccccaacgacagcatcatccatttgctccacattgtggaacccagcatttgctatgaagtctccggcgttctgccggatgaagtgcccgttcccgtgatggaccagacggaagaaaacgaagtcatttccatcgccaaaaaccatttgaaacagacggcggaaaaactctcccggctgacggacgccacaatcatccaggcggtggaagatgaatttgaaatcagcgaagcagtcattaattatgctgaaaaacaccacatcgacatgatcgtggtgggcaagcataaccacggcttcctctccaccgtctttctgggcagcgtagcaagctccgtgatgcggaaatcccccgtgcccgttctggtagtgcccgtcaccagggaagaacagtaaaaaccgccatctcgccagctccgtcccaatccatgattaccatactctttataggcgatgtggtcggcgaacccggacgcaccgccgtgaaacacatgttgccggaactcaaacgggaacacggggcggacttcatcatcgtcaacggggaaaacgcggctgccgggagaggtatcacgccccgtctggcacaggaactgctgcacgccggagtggatgtcattacaacgggagaccatgtctgggaccaggcagagctggccccgtggatggaatccgaaccgcgggtgctgcgccccgtcaactatccgcagggaacaccggggcacggaagcgtagtcgtggaaactcccaaggggaaaatagccgtcatgcaggttcaggggcgctcattcattcagccgccgctggaaaaccccttcctcatctcggaagcggaagccaaaagactcagggaagaaaaaggcgtgcgggttatctttgtggacatgcacgcggaaacgaccagtgaaaaaatctccaccggctacaatctggacggcctggtttccgccgtcgtcgggacacatacccatgtgcagacggcggatgaaaccattctggagcgcggcacggcctacctgacggacgccggcatgtgcggccccgccgtcggggtgctgggacgggaacgggaacctattctccagcgtttccgcacctccatgccggccaaattccccgtagcgaactggcccgtgcgcctctgcggagccgtcgtgcaaatagatgaagccacaggcagggcgctcagcatcgcccgcatcagcaaaatcgtggaaaaaccggcctcctgacatgcatgcttcagcagcattcctcttcccgtacccggtggcggcgctctgcggatgttccggacatgtcggaagccccgtgaagcgcggccagaacgcggattataagaaaaacctgtttcaacggacgccatccatcaggcgtcccgcctccccttcccggaataacgggaagctggctgtggcgtccggaatccaaggatttcccgcgtctccatattttcaggatgaaacaacggacagaaacccgggcgcccttattccccttaatctcccatactctggaacagacacgtggtcatgaactatgaagccagattcggcggtataggccgcctgtacggaaacagcggactatctcttctcagaagcgcccgcatagccgtcgtcggcattgggggtgtaggttcctgggcggcggaagccctggctcggtcaggcgtaggcactatcattctgatggatatggacgacctctgcattaccaacaccaaccggcaaatacatgcgttggcgtccacaatcgggcaatccaaaacggaaaccatggccacacgcatccgggaaatcaacccggaagcggaagtcattcccatcagcaatttctacacggcctccaacgcggaaaaactgctgtcggcggaaccggacgtcatcattgacgccatcgactccctgatacccaaggcccacctcatcgcctcctgttaccgcggcaagcaaccgctggtaacctgcggcggcgcgggagggcgcatcaatcccgcccggatagaaatagacgacctctcccgcaccaggggggatcccctgctctccagcttacgctacaggctgaaaaaagattatgcccttccgcttggagaaaaagcccggaaactgaaaatcccctgcgttttctcccaggaaacgcccgtatatcctacctgcgacggaacaacctcctgcacacgtgatccggaattccaggggaaaacgggttgtgacgccggatttggctccgtcacccatatcacgggaacctttggcttctttgcggcttccgccgccattcaaatgctcttaaataagaaaaaaacaccatcgtcatcatgaacaaactcctgctttccctgctgggggccgccctccttcccgccttgacccaatgcaacaccctggaaaaagacattgccggcatcaacgcccgcaatgcggaaatagcccgcgaacccaggggaaactacttcgtcggccgccgctaccatgtgccggcaacgcgcttctggggatacctgcgccagccgggccagacttggagaacggcccaactcgtcatcatggatgaaagcgcctgccgcaccccggaccgcctgccggaatacaccggaaatccgcgctacgcctacgacaacaactatgaatacagggtatacggcaaatacacgggcaaatacggttacgaacccaattccaatctgaggctgcccatcttcaaaccgaccaggtttgaagtggccaacaccaaccccggctggctcttcaaaccctcggaaaaatatgataccggagccgttactctgcgccctgctatcatgcccgcgacaacctccctcccgatccggtaagaaaaacctgtccgcaaaaacgggcccggaaagataaaaaagaagaaaaagcttgatattttcatttctctgcgctaaaaactccccgccttaaggcctccatgctcaggtggcggaattggtagacgcgctagactaaggatctagtggtgataaaccgtaggggttcgagtcccctcccgagcaccattctctttcataccgcaagttgctggtttccagctcttgcggttttcgtttgccgccggcgggaaaataagccgcaacacattttttatcaacaggggagggcatgcgctataaaaagaaaggcatttccccacttccggcccccccgaactcttacttgccggaaacaatccggacgtaatcagtaaaggattggcccttacggcatccgttaaaaaccctccgccatcagggccacggcttcttcacggctcggcatggaacggatggctcccttgcgtgtcgtcacaatggaagcggcggcattggcgaacaaaagcatgtccgccaactggccttccgtcaggttttccagcccggtttccagaatccgatccaggcagcatcccaaaaaggcgtctccggctcctgttgtgtcaatagtcttgacgttcaagtacgtaggctggtgaataagtttgctttcataggcagcccagcttccttttctgccccccgtcaccagaataaggcgcaaattgtcgaactccctctgcaaaatcctcaacccttcttccatggtggcgcagccggtgaggaagaaaagttcctccatttctattttcatgacgctgcatgcgccgcatccgtagagcatttgttcccgggccagttccatatcaggccacaggggcggacggagattggggtcaaaagagatgagtgctccttttttccgcgcatggctgacggcatgccgggtagccctccgaacatcatcatgcgtcatggaaatcgtcccgaaatggaagatgcgcgcgtgctccaccaattcaagggccacttctcccgcagtcagcttcatatcggcgcctggattacggtaaaaggaaaattcacggtctccgtgttcgtcaatctgaacgaaagccaacgtcgtattgacttcccgggatgagacgagccctgaatctccgatgccttcttcctgaagcgtgcggcgaagcattttcccgaacatgtcgtgacccactttgccaataaaggaggttttgcgcccgagcctggacaacatggacaggacgttgcagggagctccgcccggattggcctgataaacgggcagttcccggtcatttattccgcagggagtgaagtctatcagcaattctccgagagctacgacgtcatacatgcttttgcaaatgttgaaagtgaaccttccggcgaaatataaaccgggagagataaagaagcatagaacgcgacagccttgcgggaaaaggaaaaagagattcattccagtcatggcggaaaaggaatttccccttttatcccgccctgcagaaacctcgaaggttgatggagcatccggatgtgaacaagtatggcatatatccctaacgccctccactcaggaaatgcccatcaagatgagacggcaaaaacagtcctgcgcgaggcacgcgcggaacgctggagagagtgtccccaacggggcaaatgcccccttacgggcatttatgggcgcgacttcttctgctccctcccattcctccgcaacaaacacgcattttcaaggcatttcaagcttctttaagagaattcaacccttttcaagcatgtgtgatggtcacagtattccgcatttttcttcatgattcccttcccatcctgtaatatgcgcccatgcaagaaaaaagcaacggctttcaatggcccgcacagtggatccccgatattctcgccacgttaatgttcgtggtgcagaaaggaaggattctcctgatacgcaaaaagaggggaatcggcgcgggcaaggtgaacggccccggcggaaagtttgaaccgggggaaacggccctgcaatgcgttttgcgggaagttcgggaagagcttcacattgatattgaggatgcccgggaaatgggcgtgctgaatttttcctttgcctgcggcaccattccggaaatccgctgccatgtgtttatggcgacgtcttttacaggcacccccacggaaacccccgaggcggagcccttctggtgtccggtggacgggattccctatgacctcatgtggcaggatgaccggttctggctacccgccatgctggacgggaaacggtttgaggcgtttttcacgttcgagggggaccggatgatggaattttccctgaaaaccggggattgaaccgccaagaaaccccaggttgcggcctcctccctttaagccggatggggaacgctgaacttttcttattccgtccttccccacggaggcaacagattcagaaggagggggaaacagtactgcccagcgctccagaaaagattccctgaaattcacctgaaggtggggggcaaagagggggcatttgcccctgaagaccattctgaacagcagctaacgttgaagggccggcttccgaaaaaaatggacctttccccttgtaccgggatacatcatattcatctccttccctccaggtatcctgaaacggatcataggaattgctccggacgccagcatcgcagagatttccccatggcgtccagaaaaaggaaagttctccctgccggaaaccggttccggcttgaggttcatgcgaagggctggaattcagccaaatccgcggctccgtaagaaaacggggggatggttgcataaccggaccggtaatggaggtttaagggagcaaatcagctccagcctttattttttccaagcgcatccgaatatccactggtgcatcaaatcccttttccgtaaacgggcgtgggcttttctttttgcccggtatccgggaaatgctgatttttccgatgttttgccttctttttcaggtaatgcgcggatgcctgcgcccttgccgcttttttactttgcacggggaaaggacggctcccgcctccgggcatcaggccgtattctttaagcttttcctcccgcttccgttgtgataatgatgcgggagcaaccgtgtgatccttgatcgttcacttgctgactatttcaattcatattccattattcaacatgtatacccccgaattcaaaaacatcctcacttccaccctggacggactgcgtgcggaaggactttacaaggaagaacgctttatcgcctcccagcagtactcccaggtgacgctgaaggacggacgctccgtcatcaacatgtgcgccaataattatctgggccttgctaataatccggaagtgatggaagccgccaagaaagccatcgaccagtggggtttcggcatggcgtccgtgcgttttatctgcggcacgcagacccttcaccgtcaattggaagaacgtcttacccaatttctcggcacggaagacacgattctgtttccctcctgctttgacgccaacggcgggctgtttgaaggcctcctgactgcagacgacgctattatttccgattccctgaaccacgcttccattattgacggcgtgcgcctctgcaaagccaagcgcttccgttatgccaacaacgacatggcagacctggaagccaagctccaggaagcggacgccgccggagcgcgcgtgaagttgatttccacggacggcgtcttttccatggatggcatcattgctcagctggacaagattcacgagctggcagccaagtacaatgccattgtccactttgacgactgccacgccacgggcttcctgggcgaaaagggccgcggcacgcatgaataccgtggactgttcggccatatagacatcaccaccggcaccctgggcaaggcactgggaggcgcttccggcggctacgtctccggcccgaaggaagtagtggatgtcctgcgccagaaggcgcgcccgtacctgttctccaacagcgtggccccggctatcgtagccgcttccatcaaagtgctggacctgttggaacagtccacggaagcgcgcgaccgcgtagaagccaataccaagtatttccgtgacgccatgacgggagccggattcaccatcggcggcaaggaccaccccatttccccggtcatgctgggggatgccgtcctgtcccagaaattctccgcccagcttctggacgaaggagtgtacgccgtcggcttcttctatcccgtcgttcccaagggacaggcccgcatccgcacgcagatttctgcggcccatacccgcgaacagctggacaaggcgattgaggccttctgcaaggtaggtaaaaacctgggcgttatttcctgattcccgcgctttccatggcttcggacgcatcacccatgcccggcggcaacctgccgacgctgcccgtcaagcgggtggtgcgtcccactccctccattccggatcatgaagttgtgcgccagatagggagcggcgcgtacggagaagtatggctggcaaaatccctgaccggggcgtggcgcgccgtcaaaatcgtatggagggaggattttgaagacgagcgctctttcaaccgggaatttgagggcattctccagtatgaacccatcgcccgcaaccatccggggctggtccatatcctgcatgtaggaaggcatgaccaggattccccgttttattattacgtcatggaactgggcgacgacgcccgcaccggagttcatattacaccggacgaatatattccgcgcacgctccagacggacaagaagttttccggcaacaagcctcttcccctggattactgcctggaggtaggcagccagctggcccacgccctgctgtacctgcacagcaagaacctgacgcaccgggacatcaagccggcgaacgtcatctttgtcaacgggcgccccaaactggcggacataggcctggtggcccatctggaccagcgcagctttgtagggacggagggattcatcccccccgacggccccggcacccggcgggcggacgtttacgcgctggccaaggttctgtatgaaatcagcacgggaaaagaccgcatggattttcccgaactcccggatgacttgccggaaggcaccgtgcgcaagaaatggcaggccttcaacaccatcatttgccaggcggcggaaccccgcattgaagaatgccccattgattccgcagaggagctggcggaaaaaatagacgccctccgggggtatgaagtgccttcccgtttccgtcttcagaagaaaaagaaacgccgcaaactcagacgggccctccaacttctggctgcagccgctgccggagccctgactgcctactggggggctttatggctcaacaacagccagcatccgccggaggaacctgcctcggatattcatccggatatccactcatccgctccggaagaagaatcccggaccggatacgtgctggtgaccagctccccggcgggagcatccgtgtatgatgcggacggcaactatctggatgaaactccctatggccccattgaattgccttccggctccccggtagcctataccatcaagaaatcggggtttgcggacaaggaagaggcgggaaccgtcaaaggaggggccacgctggccctgggcggcgtgctgaaggagtaccatccccctacggacagccaaccctggaaggatacggagggtgttacgtacctgcccgcagaaacgcgccatgtggcgcaaggcccccttaccgccgccctgttcaacaaatttctgaaggaggaccgccagaaagggaacttccagatgaaaagggaacagacggaaccggggcatccggagaaggatgtggccctgctcacgcaggacggcatcacggcctacctggcgtggctgaacaagaaatgcgagcgggaggggctgctgggcaaggaattttccatcaatgcggatccgcttccgcaggcttccggcagcacggaaaaccacaatgcctacgtcctgaatgtcacccgtgtgttccaggtgcccattaccgtcaccaccaacccgccgggagccagcgtttttttcaataacaggctcatcgggcgtacccccattgaagaatacgtcaaccaggttccctacgtcattgaaatcaaactgccggggcacgccaccatgcgtcgcagggggctggatccgcaggacttatacctttccctgcagttggaaccggacaagtctgtcgtttttggctcgccctggaccaacagtctgggcatcaaactggtccctgtgggtgggaatgctctggtcatgacccacgaagtgcgcgtaaaggactttcaggaattcctgaaagctaccggaaggaaagctccggcccggcccggctttccccagggagaagaccacccggtggtgaatgtcagcaggcaggatgcgcgcgccttcgccagatggcttaccagcaaagagcgggccctgggcctgattgatcagcacgactcctaccgtcttcccaaggatgaggaatggagttcctgggtgcgtctgacggatgaacagggagcctccccctatgaaaagacgctgcctcatgaaaactcccgggaagccttcccgtgggggtattcatggccgccgcctgataaaacgggaaattttgcggaccagtccgccctgatttacctgccgtcctcccgcgttatcgtaggatataacgacggacagccgtatacggcccccgtaaaaacctttccgcccaaccacttgggcctgtacgacctggaaggaaacgtcatggaatgggtagacgattcctacggggggccggaatccctccccatccgcaactacggcgtcgcccgcggaggcagctacctgtccttccgccccaaacagctcaccacttccatccgcactcccctgccggaaaatacgagggataacgcgttgggcttccgtcttatcctgtcttccgaacgccccgccattccaacagctccctgacgccgtatctgcggcagcggttttccccgctctttccccctctgaaacaaaccgccccccccaagggggaaagccctgaggcttgagagagcttccggctctccgggaaaatgattgaaagggcctcccgttatgctaccatttttccgcatccttttcctgaatgaaaatcatcgccatcgccaaccagaaggggggagtgggaaaaaccactacggccatcaacatggctgccgccctggctcagctgaaaaagaaaatccttgtcattgacctggacccgcaggccaatgccaccagcggcatgggcattgacggaaaagacatgcccagcctgtatccggccctgctcggccagcttccggcggaagagtgcatcctgccttccggcaggaaacggctggatatcatcccctccaccatggacctggccggcgtggaaatagaattggcccgttccggcaaccatctgacccgcctccgggaaacgctcgctcccctgcgggagtcggacacctatgattactgcatcatggacacgccaccttccctgggcgttttaatgacctccgccctggctgcctgcgacgaagtgctgactcccctccaatgcgaatggttcggtttggaaggactggccaagattctgcacgtgacggcgcaaatctgcgccagcggcgccaatccccgcattcggcatgaaggagtactgatgaccatgtatgacggccgcaccaatctttcccgccaggtcatcgaccaggtggaacggcatctgccccagatgctgtacaaaacggtcatcccccgctccatccggctgggggaggcccccagtttcggccacaccatttttgaacacgatccttccggagctgcggcggacgcctacctgaaagcagcccgggaattcatcaaacgccataaaccctgaacatttggagaaacaagcttcccggaatgccgcaaacctctgcgggagggacaggcagaaagggcaccgcagaaaacttcctcctgcattttgccttccgggcttgttgcgcccatttaacgtcaggaaaacctcttccataccgcccccccggatacggaggaaaacaggcattccccttgacttgacttccgcggcatataagaatgctccagctccgtttcaggaacttttcccctcatgccagcagaagaaggccagccagacgaccagccccgggtgacagggcaagtcccgcctcccgctccgacgacaggcctggaacagattctgcccggacgtccgcccctgccccatgcggaagaaaaaggggcctttttcgtttaccagcgggagctggctcccggcacgcgcctggaacaatatgaaatcatccgcgtcctgggcagcggaggttttggcatcacatacctggcgaaggatctgttcctgaaccgcaacgtggttatcaaggaaaacttcccttcaagatactcctaccgggaccctctgaccgggcatatccggcccaataatgaacacgatctggaaaattacacctgggctctgaaaagctttctgagcgaggctcagacgctggcggagctcaacaaccccggcatcgtcagaatcctttccgtctttgaagccaacggcacggcctacttcgccatggagcatattaccggcctttccctggattatctgggggaaaaacttcacagcaccggacaccggtatacggaagacgaactcaaggggctgctgacgcgcctgctccggattctggactatctccattcccggcacatttaccaccgggacatcaaacccggcaacatcctgctgacggaggaaggcacgcccgtgctgatcgacttcggagcggcacggcatgccctgaaacttcatgccgccaccgtcctgaccacccaggggtattcctccccggaacaggcgctgggcaaaacgaatatcggcccgtggagcgatctctattccgtaggggccactttttacgccctgcttacaggaaatcctccagaccgcgcggaagcgcgcctggcggaagatgaaatgcagccgctgcacagcgaccccgtgctcacccgctattactcacggcagttcctgctttccctggacaaggcgctggccccccagatcaattgccgctaccagactgccggcgaatggattcacgacatttgcgccatttccggggaagaatcctccgccactattcaagtcctcccggcagacctccgccatgcccatccggaaggaatgccaactcccggcgccgggaaaaacatcggcagcagaaaggccgccaccggaacggacggtcttcattccgcctcacgcaggcagtccgcacgcgctcttcgccgcaaccgccacatgatgtccctgctggtaggaagcgcatgcaccatcctgctgggagcgggagcattttatctgctggattacatgaaaaaagcccctatgggcactaccatcaataccatcaaggaagccatccagcagcccgcggcaagctccaacgtgggagaaccggaaccgccgccacgggatctggcatccatccgcattccggaactcaaaataacggaagacgcggcgctggaaccgcggtcgctgacggagttccgtttgcgccttgacgacaccatcctgacccgttccgggcttcctcccatcctgccggaaaaactgcgcatctcctgcatttatctccaaatcattcccccagcagcaaacggggaaaaactgtacctcaccatccgggactccaacggcgtcctggtggaccgctccatcaatgtcgtcccctccttcacggtgccggggcaatccacctccaccttcttctttcccgcactcccggaactgtccacggaccgcacctacacgtactcctttgaaaatgccgcccaccaggctgttcccatgcaaatggcatgtttcaaaaacgagacgaaacgcacggatgaagccttcccgaaaatccgtttcatcgctgctccccccgcgccggaaccggccctgctccatgacccggcctacaaaaatcttgtggcggcaatcgccgcgccctccccggagaacaaaaatattctcgaccaggcaagttccatgccgggcatgctgccggccctggagcaactttccaaagccggctacccgatagcccagcaggcactggggaaaaccctcatgtctccggactgtcccggcggttccaggccggaagaaggcgtggaatggctttaccgttccgccacaggagggtgctatgaagccatgaaggagctgggcatcctgctcatggacatcccctcctattttccccgccttccccagcagcctccccttgcctcccgggattacgcccaggcggcgcgtttcctgagaatggcggtccaataccgggaccaggaggccctgtacctgctttccctcatgtactcccagggctggggcgtacccgcctccccggaactttccagcctgatgatggaacgcctcaatggatcttcctactccacggacagcctgaatcccaacgcgcctatcgcggcgtactggcttccccttcctcttgccggagaaaaaaacaccattctgcgcttcactattccagggccgttcgccccgtcccagctcaagggcgttactctgcacaacacaagcctgaaggatgccttctccatcagtaaaatcaatattctccaacatgggcacctcattctggacatcatttccccccaggaagtgctgcccggcaaaagctccgctcccataggcatatccatcccggaagggctgctggcggatacgaccctgcctctggaagtggaaattttgctgacccccggaaacagctgcggcgtggtggaaatgccccctccggtggaaaagaaaaactccagaattgaaatcaattaagcttcaccgcttttcaacgtgaaacagcaacaggggaaacggaaaacacccttgattcccgcctggggcatgctacaaaggataaatgaatgcctctgttttcctgcggcgcatgctccctatgttggccgcgttcctgatggcctcctgcggtgatcctaccgtctcctactggaaaaaggcggcggacatcaatacggaatactcggaaaaaagcgacgcactggtgcaacgcctcctgaaactgaaaaagaaccctacccttccgggcctggaagaaagcagcagggatgcggctgacctgttgcgggaaagggacgaagaactggcggacctgagcacgaaaaacgtggatcccgccgtgacggcctatgtggcagaagaccgcaagctttttgccagaggaagggaattggcggaacgctaccagcaatactttgaaaaatatctcaagggaggaccggattttactccggatccttcccgggccgtcgcccatataggccggggccggcaggaaatacgcaaaattctggcagaagcccgaaaactggaagaacgggctgaaatgctgagaaaagaaaaatcagctgagctcaagcaagaacttcctccgctgtactttcgccttccggagttgaaacaacttctatccagccgttagaaaacgcgcacgaaccacttgcatcaatgcggagtctcggccagtctgacagcggcctttacactgcacgggcggacacaaccggctcctgaaactttccccgtccatgttacggaaatatcccttccctggatttacaggaaaaacgagtccccctgctgtccatcgtcgtttatttcagcattcaaatttcattccctgaataccccttagcacaggcttcatagtttaaaattccaaagaaggggtttgcctcccctccacaaaaaagccccgttcatatttcatgaacggggctatattaatttttcaaattcacctgggagtttgatcaatgacgataaaatcctttttccccacatactccctccgggcatccggatctccatattcgtcccggaaacgtacttccaattcgtatattttcccgctggccagaggttgtaaacaggtcagcagcaggtatgcatccttgacgggcacttcatatttttctccggggttcagggtaataaagcgcataagattcgcgacacgttccatttgataggagggaagataccatgccgttggcctttctcccttctttccgtttccctgactccatatcttgatgatcatattcggcccgcgttccttgagaggatagaagtcgtcgaaaagacgcacagccttttctcccttattggcaaacaccagcttgaagtccggaaaagcggctcttggatcgaacgaagccttttccatcaccacggaacattcaatcccgttatcggccatatccccccatgcaggagcatggaagaacaggctggccaaaagccctaaaatttggaagattttttcattgcagcgcgagcttttgggagaaggcgagaattcgcgcttcatcgtcgagttcccttcgtacttcccttcctggataggttccttgtccatcgtgacgttgaacgcgaccgcattgccactagagggatcgtaagcgttattctcatactttaaagccaccttgtaataaaatgtctcactatctccagggcgattgatcgaccacggagaaatcttttcttcctacatacttcctccgaacaccgggatctccatatccgtcacgaaagattacttccaactcatatttctcaccattgcgaaggcggcgtgaaggcccaaaatagtgcatcaacagatacgcatctttgatgagcacttcatgtctttctcccggcttcaacgtgatgaagttcaagaactgtcctcgctcaatgcaataatgagggtaatatgctgctaccttttcctttttctcttttgtcaatttccaaaaaatctctatggaaatatgcggaccgttatccttgagaggatagaagtcatcgaaaagacgcacggtcttttcgcccttgttcgtgaacaccagcttgaagtccgggaaggcagccctcgcgtcaaattcggttttttccatcaccacggagcattccactccgttgtcggccatgtccccccacgcaaccacatggagggacaggcttgccagaagtattaaataccggaagatttttttcattgcagcgtgagcctggccgttgcccggagaacccccaggaaacaatccttaccctgctgattatagtagcgcatttccagttcacaagaacattgtttccagccttccagatcgacttcatccagacacaccggaatcgtgacactgtattcctggccgggggccagttcccggtagttcaagggtcgctggaaggtcatggtgcctatttccctgttcagaacgcgcattttcccctgttgcgtcctcaacaccgtcacgaaaaagaaatcggacgtttcgtcgttgatttcatcgggaatgcggacaggctcgtttccttcgttgcggaagcggactgtgattttgccttccgtgaattgggaagtatccgccatggagaggatcaaggacgccggttcctccgcaacagccatgctgcgggtttcaccttcgctgaccggaggcatgaaacagggaggctcgatcgttccaggtttcgtgataaacctgggaacattgttccaccccatcgcgtcggccaaacgaatgacataggcggttgcctcgttcaggacttcctgtccggcgcaatagggtctgtcattggcatcatctggcaacgccagtacataggctgatgtctccgtccaaagatccaatgccatttcattggcaagagcctgcatgaacttcacggctttatccatgttcggttctttgtcgcaggagatagtctgcttttcaagcatttcctgtattttggagtccttccagtagaacttgtaggcatcctcccattgacggcggtggtgttcttcgtgggcgagggaagcctgcggcgtgtgccatgtacccactcttccgcgggcctggtagccgttcatttcgttgaccgcttcgacggcttcttcttcattgagagggggatcaacatagggattcacgtaaatgccttcatacatagttagcttggctccggcagaaacggaaacaacacgacacctccatacgttttccgattcatctttgcaaaccgttacgcaaatcttaggtctcaagctacttacattgcagtcaccattcccttccaaatagacgggttccggtttctcaaattccagttccacttccttggatggctcacaggtgatagtggattccttttcaattgtccacaatttgattttgggggacggcgagaattcgcgcttcatcgtcgagttgccttcatacttcccttccgtaataggtttggtatccatggtaacgttgaatgcaatggcattgttgctgacgggggtgtaggcgttgttggtgcacgacagggccaccttgtaatagcccgctttcaggtacctggaatcggtttcaatattcagcttgccgttgggtggtgtcccatccttttttatagcttgctcaccggcaatcgtcaggctgcctgtgtcgtcggcttccacgccgaaatagtacaagccgtcacgctccaccttgatgaacatttcgggagctccagtacaggtggcataatccgaaggagttccgtcaaagccatatatcatttcatcaacgccaagcgtcttgttgataagaggctcatacccttgatagatgcagacgggattaactgccttgttgattggtatataattgttcattgctattgttgttatttactttctggaaaaactgaaccatcagccttccggcatttctgcggcattacctgaacccatcaacacgtttaacgcgtagtcccccctcattcggaacgaagaggaacgacctcccctctaattttacgtgctgccgtgaacttgcaaaaaaactcctggtgcgtttttatatcctgattcacgccattttggaacaaggttgctccatatagatctgacaacaggcacgggcggcattccgccgcacaatcatgatgccttaaaaaacaagcattctcctccttctctgtccgttccgccaaagaaaaaggctgtttccagagagtccttcacttaaaaacaaagcatcttttccaaaaacgagattgacacccgcggttcttttccctagtatccgcgcacagcatcagcggcggggtagccaagtggtaaggcgacggtctgcaaaatcgttattcgcgggttcgattcccgctcccgcctccatatttactttcaacattttacgcatttagcgtagtaaatatcttgtttttagctccacatttggagcagttcttgtcttggaaaagaggtgcgttatgagttccagcccctctctgttatacacgtttcggagacctgcttgatcacctcctgcgcacctacggagaaacacaggaacaatggaatgcgccttttgatgccgctcccatctttccggaactctcaaaacaattctatgaatgcggcttgaatcatcatcagcttgacgtggtgaaagaaaaaatagcggacatgcgcttgtacgctttcactttaatgaaaaagaaataaaaaaaacatacatgctaaaaatttttcaaaaatacagaattcggactcagtaatgaggcggccattcctgcagaatagaatgagcttattttggagaataaatcgaatcgtatcttctcaggaaagattccattgttgaacttatatgatgacacatttaattttgcaatgctctcagccttcactaaaaaggaaaaattgacaaaacgcagagaacaggtagtgttctcagaaaaggagaggatgtagccatacgatgggcttttccatattctccctttaatgcctctttcaaaccaaagtcacgatgaataaatatctttgctctgtcgctctctgcatcgcgttcgcctcccactcccctggggagtggctctatgccggaggagaaaatcttccctcaaactatccttacgcccacaaaattggtaaagacgatactggaagaaacgacagcaatatgtgttgggcggccacctcctctaacctcatcgaattctggcaacagcgctaccaaaagcaaacgggattaccccttccaagcggagttcccgggggaacggattcaagcaaaagaggttccgtggttttcgatacattcgttaaagcctggcccaatacaggtttaggcgtggaagaaggcttgcactggtacttctcagggtactaccaccaggcagagacaatagcgccaagcctccccggtggatactgggctgaatattgcaccacgctcggctaccaagctgattacgacagcctacataaaaaggactatgtagacttcacacttatttcctacccgactaattcagactactattcttacgacaaagagcttaatattaaacttttcagcaacgccgtcaaagccggactggaagcaggatctctcattgccttaggggtaacggacttggccaccatgggacactacatcaccctttacggagccgacttcgataaagatggtattatccgttcagtactcattcaggacaacaattacagcaaacctcctactgagtgtgatgtagtatataatactgctactgctaccgttggaagcgatgatggaaaagagggaagtcttcccctcaaggaaatcgaatacacgaaaatcacacttcctgatcttctcagtggttatggtgatcgccagctcacctccatcgaatatcttaatcttcaaatcattccagaaccgggaacagcagtactctctctgttatccttaacaatagcagttctgagaagaaggcgctgagcagtctgcccccttctccatacccccttttaatccgtacaaaagtgccgttcctagacaggggcggcacctgtcaaattccgaatgaatgtgtgaggacatccccatatccagcaggggcggaatacggtacggaagaagacgactctggcaaaaccaagcgctctattctggacttgctagaaacgaaccgccccatcaaccggcctattccactctcccacccagtatagacagcccggataaggtcacgccctgctccataaatccagtgcggcatgtcctcattgaccttaacagaacacccacaccaaccccacacacctctcccctcccactggaaagcgtaagtctccaggaaactctgcaaaacaatcatccgccccccctatttgacccactgccacttattgatcttcaaaccccatgatcccctccataagcttttttgaaccatacggaaggaaaagaaaaggcatcatgaactattcatgatgctgggaagaataaaaaaactggcatcgcgtacgggactcgaacccgtgttgcccgcgtgaaaggcgggagtcctggaccgctagacgaacgcgacttttaggtttgcagggactgcggggaggagtaaacacaacctccgcataaaaggcaagaactatttacgcggaataataaaaaactctttctgtccactcataaacgcctccttttttaacagtaaattttcatgattctccccacggcaaacagcttcttaaatcctaccagaataactttttctctcgcctcagctttcaccttttaaaaaaatcaatcttcttattccccactttccggcttctctgtccaaacttattcatttctgacgcgggcctttcaacgtgcatccggagtgctgcttcatattgtccgcgatctgcctgactgaacaggaggccgcatgattgcataaggccagtttctttttcggaattatgtagaatagtcttgccttaaaaattttcaaaatactttggctattgatattcagcaaattacttttacaaaaaaagtctaaagtaaataattccgttctcttttttatgccttgaaccggaatcttttttacgccattcccgcgggatgattctggattttttctcctgttgtgatacagtagttttcgtcatggcagcccagaacgatattatgctgaacggagccccgtacgaactggcggaaccttgttccgtctcccggcttctggaacttttgaacatgaaaggcaaacccgtcgtcgtggaacacaacggggccgcgctcctgccgcaggatttttcccgggtgacggtttctcccggcgaccgggtggaaatcgtctccatcgtcgccggcggctagggttcctctttctggaacagtcttttccaatccgtcatcgccatgccatccatccacgtcatgtctcccacccttgccagccaagtggcggcaggagaagtagtggagcgccccgcctccgttgtgaaggaactggtggaaaacagcctggatgcaggagccaaattcgtacgggtggagatacgccgcggaggcgtgggcatgatcaaggtgacggacgacggcagcggcatgtcacgggcagacgccgagctgtgcaccaaacggcacgccaccagcaaactttcttccctgaaggagctttttgaaatcacacatctggggttccgcggagaggctctgcccagcattgccagcgtttcccgcttcaaactctgtaccaggcagcagcaggatctggaaggctgggaaatacgcattgacggcggcctggaacacgaaccgagaagctcaggcgtctctcccggaaccgccattgaggtggccgacttgttttacaatactccagcgcgccgcaagttcctcaaatccgcagaaacggaagcttcccatgtggagcaccagatacgcctgcatgccctggcttatccccaagtacggtttgcctataaacgggacgaccagcttgttttcgaccttcccgccacagcggatctgcgcgtccgcatttccgcactgacggatgctgccacagcagcggccctgattccgatagaaacgaccatcggccccggtatttccatcacgggattcctgcttcctctttccgaagccagacgcaccagaaaagggcagtacgtctttatgaacacgcgccccgtggaggaccagctcattaacagggccattcgggacggctacggaggcttccccaccggactgcacccggcgctttttttgtatatggaggtggagcccgctctggtggacgtcaatgtacaccccgccaagaaggaagtgagattccgccgttccgcagacgtggtaaataccattgtggaagccatagccaacactcttcaaaagcacgcccggcaggaaatccacgctgccgccgcgccggagccggagagaactctcctcctgcccattctaccaccgcgccgcatggggaaatacccgcccgttccaccaaccccggttctgctttcccggcggccgccagaccggcccctgcttcttccgccgcccaaccgccgctttcctcttctgccagacaatcctatgggcctgtccctccccccaccctccgggccattcccctgaaacaggttcccgccacccaggggaaactggattttcaccgtcaggaggatgaagaaacggcacgaaacgcccatgaaaacgcagctccagaaagggatgcctccgccggattttcctatctgggaacactccgccagcaattcgccctgtttgaaacgccggaaggcctggttctgatgcatcccaaggcggcccgggaacgcatcatatttgaacggctgcgcgcacgccgggaagcccccatgccgtcccagcagcttctggatccggtggtgctggatctggacccgcgggattttgccgtcatccggcagttcgccccgcattttgaccaggccggcatggtcgttacgccctttggacagaataccatcagaatagaatccatccccgcactgctggaactggaaaacgcacgcgcttttctcctggagctggtggaccgtctcacccagtccgaattcagccgaaatgccaaacgcgtggcttatgagaccttcattggggaatttgccagaaaatccgcctggagggagcgcatttcccctcaccgggcccctgccatcctaaaggatttgcttgcctgtgaagtgccgtactgcaccccggggggcaaacccacgctggtgaattattccgttccggaaattaaacgtaaattcggcctacaggcataaataagggaaccttgttttccggaaaacaggctgaaacgctgcaagattttacggcgaacggaaaatatgcagccaaagacggattgatgcccgcttctgcggtatattattttcccttaccgatactcagttttatttcagccgcagtaaggggcagaaactctccctggcaacagggatcattttatcctgtccggctacggacaccttttccgtcttgtccgccagaactctggcattcggacgcatcctcccgcatacaacagggagcttgctcttggcaaggaagtttcccgcgtttatactgcagccttccagataaattcccaaccatgccagactctccccccagcacctcccccgctccgcgcattgctgaaactgccgccgggaaaattctggcggggctgctggcccttttttacatcttcctggcaacgacggcggcaggcggagaatggcacacccttttccttcccgcctgctttctggcggcagccctcctgctgttctgcttctgtattctccggggatacaagattcccagccccggactgccgggctggctggccctgggtctgggaggcggctatttccttgtccgggcatggttttccccctggttttattatgagagcgtagcggatctgggccttatcgccacggccatcgtcatgttcgcggcgggaacgtatgccggagccggaaacggggaaaagagtattcttcccgtactggctgcggcattggggctgctgaatgccctgctgtgggggtatcagaacataacgggaacggaagcctcctggttcagaccggattattccctgttcggcacggaaatccgcaacatcggattgttcggatacaaaaatttttccgcccatttcctgtccgtcaccggttttttcctttgcgcatacagcacggcttccgccagaaaatggggcatccgcctgttcacgggattggcgctcatcctcgtttccttcacgtgcggctcgcggtccgccttcccaaatgccctggctggcgtaaccctgtgcttctttatttatacctccagcgttttccgcaataacagaaaattttacacggcgtccatcctctttattatcctgcttttcctgggcacgtcctatgccgtgctggatttgtcccggggggcgggcaggcttgccgcccttctggatacgttttccttcggcaaccggctggacctgtccaaactggcctgggcgctggcggaccaggctccgctgttcggtcacggcagccggatgtacaccaatctttccacggagtttttctccggagccaacctccccaattttgcccaccacgaatacgcacaagccgcctgcgactacggctatgccgggctggggctgatgctggctctgctggccctgtttcttatttccggactccggagcgttctgaaattgtcaggagaacatcaacggcccaatcccctgggaccggcggcgttctgcgtattgtgcatcgccgctttccacgcctatggggaattcatctggcataaccctgccttgcttggagccagcgccctatgcggcggcattacctgcacggcccctctttccagggtgaaggcttcgcgccgagtcggccgctggcttcaagcgaccgccgcactgctgatggccatattggctctgtgttatgcgtttctggcttttccggtctggaaaaactcccttcaagccgtcccggcttcctccagcaaccggctgcccatgctggaagcggccgcctcctgcagcctggacccggatttggtgcggcgcaacattctgcatgccgcaggcagtgctccccccccaaacccggcccggctcaaagcattggagtatcaggaagaaaaagcggaactcctgagccccgggaaccacggcctgacggcggccaaaagcctcctttacatcctccagggacgcctcacggaagcggaacagctgctccgcccgtacgtagagagttccggcaggtttgacgaccgcatgttcgcctggactaccatttacaataatatgctgtattcctggagtacggccattgctgcccagtccccaggacgcgccctgtccatggccatgacggcccagcgcctgatgtccgcccaaacggaccggtggctgtattatggggccctggatcccgaagtcaggaaaaaacactactcgcgcctcaatgagctcaagatgctcatcatgatgctccaagcccgcggagcggtacccgacccttcctggaggaaatagtattccggagaatcgggaaaaaggaatatgtgcagcagccgttatatcctttttccagagaagccgctccatacagaagtttccccgtcttatccggtttcttttttaccggattccacgtcagcttattcgtccacggaacacagagcgtactgcagccagaaagatgaaaagccgacagttggcgcagcaagtccgcacaggcgttacgccggaattttaagcggattcagctatcttccgccggaagcggcagcctctccggaacagaatcgtttgtttctttttcccccaatcgcggactgccccggttggcggtcccgtaaaacgcatgtcccgacgcagctcaacagaaaaaaactttcccggctctattcctttatcgaatctttttgtatgaacataaccatcaaacgaatttatgaccccaaggaacccggggacggataccgcgtcctggtggaccggctctggccccgcggcatttccaaggaaaaagcttcctgggacgagtggctgaagaacatagctccatccacggcgctccgccagtggtttgctcatgatccagtcagatgggacacattccgcaaaaagtacgacgaggaactggatggaaacggagaagccgtttcccatctgctccggctggcgcggaaagggaaggttacgctgctgtactccgccagaaatacggagcacaacgaagctgcggctctgagggattaccttttgcaacggtttgcttcataaatagaagcatattcctgcacaaactccatccgcaagccccaaatgctgtcacgggaacctatgatacggcaggatttcttctctcgttcatgaacaagcgaagaaaatagaaaggaggtgaatacaatatggccagcagttcccacatgggtggaagtcataagggcagttccaaaaaacgctccgagactaccacaagcaaaaccgggcggcgcatcaaacgcgatgcttcaaccgggcagtttatgagcgataaaagctcaggctccaaggaaaaacattaatgcccgcgagtttttcgcctgattcaggctccggatccggtccggagcctttttatttttctccgcatccggaacacgaggaagtcttccgccatccactcaggcccaattcttcaaaagcccgaaggcccagcgcttcaggggctttccggtctccgcgaatcacaacggcaaaaggctcttccctgcccggaacgtaatacgcagcccgcagaaccagttcctctccatccggatgggcgtaaacacccacgggcgtgtaacagttcgcacccagacgtaccaggaaagcccgttccgccagcgcacaggcaaaagattccggatcattgatgccttccagcatttccgccgtctccctgtccgaggaacggcattccattccaacgatgccctgccccacagcaggaataaaaacttccaccggcaggggacgcatgtaaagttttcttccttccacaagggtttccggcgcgtacagccccaggcgttccaaaccggccctggccagaatcacggcatcccagccgggatgttccaccagctttcccaaacgcgtaggcacattcccccgcaggttttcaaaccgcaggccggaaccccagtacgtgcgcgccatcaggcgtcggcgcacgcttccggtagccagcgttccggaaccgttccagtccggttctttcgtgataagcacatcctccacggcagcacggggcaagacggcggccagcgtgaagccggcggcaagctcgctcggcacatctttgaggctgtgcaccgctacgtcaatgcggccatcccggagggcggtctccagttccttaatgaagatccccttgtccaccatgccggaaacgcgggccacatccgccagaggaacatccgtgcggcggtccccaatagtatggatgatttcacagcgcacgtccagttccggataacggagggaaagggcagcacggaccatatccgcctgggccagggccagggcgctcccgcgggtgccgatgatgagggtatttttactggtcataaagagcggaatccggaaaatatttggaaatgctgtcccggatgatggcctcgcaccgggaaacctcctgctcccggctgcgcttggcctcatccgccagctgggtgagggtatcaatatcgtagagatacacttcgtcaatatccgccacgtccggagaaatgttgcgcggcacggaaatatcaatcaaaaagagggagcggtatttacgggaggcacgcaaaggaagaagcgtttcccgggtgatgatgcagtggggagcagcggtggcggccaccaccacgtcaatatccctgagatagttcccccacacgtcataccggatggcctggccgccgatcatgcccgccagctctaccgcacggtcaaaggagcggttggccacataaatgccctcagcaccccgggcatgcagggcgcgccccgtaacgcggctcatctcgcccgcccccagaataaggacgcgggtgccggaaaggtccccgaaaatttgttccgccagctccactgccacggatcccacggaggttgccccggcatgaatctggctttccgtccgcacttttttaccgatagcaaaggctttctgaaaggttttgttggcgcaggccgcagttactccggcatccagggccgtctggtaagccgtttttacctggccgaagatttccgtttcccccagcaccatggaatccaggccgctcagcacgcggcacagatggcttaacgcatcttctccctgatggctgtaaaaataagaagccatatccagttccccgcgcccatcacccagaaaatgggataaaatgtgctcctgcgcattttccggagcgttggaccaataataaatttccatgcggttgcaggtggaaagcacaacgcactggtccactccaggaagggaacggatgcgctgtccttcttcccggagcttatgggacggcacggcaaaccgctcccgtatttccacgggagcggtccggtgattcaagcctaaacaaaccattctcatcaacttaccaggaaaatgctcatggatgcaataaagagggccacgcagcagcaggccaacatccttcccggaatgccgcggcggtagatgaaccacagcaggacgctgtagcctgccgtgagaagaatgacaatggaggtcttggccgcattaatggggagattcccccgccacccaagccattccccaagcagaagaaggaggaatgccacaagaaccaggcgcttcatgctggcttccagtgtacggatgggaggaagcacacggcaggtgccgggaatccggtgtcttttaagacattcattctgcatgcagaacgccgcccccgcggcagcggccagaccgccggctccgtaggacatcatggctatgcccacatgcgccgtcacccagaagtcatgcgtgccctgcacgtccgctccggaacggcctatcagcagggaaaaaaccgtcagcacggcaatagccggagccgtaaagatgccaagcacggacattcggtaagcacgtcccagcatcagataaaagagattgatgctccaggagaggaagaagagcacctctgaagcgccgcggatgggacacattcccgtctggtacgctttgacgcatagcgcccctgtctggagaacaaagaggcacgccatccaaagatgggcatataaaaaccgtcggccggaagccagcaggcgccatcccagccctgtgaaagccagggagaggatgagagaggcaatggcccaccagttatcgttcataaatccggcccggaaatggttcaggaacgcaaatcgcgctcaatgacggcgtatgcctggtggttatggatggattcaaaattttccgcttccacccggtaccagctgaaggcggaatgactctgcgttttcaacgccacgttgcgcaccagatcttccacaaagacagggttttcataagccttttccgtcacccatttttcatccggccttttcagcacgctgaacagggagcagctcgcgcaggattccaccaggtcaatcaggtcttcaatccagacgggcctggaagcaaaacgcacggaataagtaaccagcccgcgctggttgtgggctccgtaggcactcatggccttggagcaggggcagagcgtcgtcacgggaacgataactgtcagcttgaaatcagccagtttgttgttcgcttccgcctccatctcaaaccggacaacgtaatccatgagcccttcaattccggtcacaggagcgtttttggagcggaaaaacgggaattccatttccacatgggaacggcgggcggacagacggcggagcagttcccgcggaatggccagggccgtatgcacatccagcaaagggccatgctggtgcaacgcctccacaaaacggctcatatgggtgcccttgaattcttccggcagatccaccgccagagaaaccgtcgccacagtggactggatgcggttgagcttgtcctgtatctggatggggaagcgcaacccttttacgcccacccggtcaatggaaatattgcgcgtatccgcctcggactgggtatctttcagttcctgcatggggaaaaaggataatgggtggaaataaagcgggagtctgccctgttaccggacaaactcccgcctgcaaagacaattctaccgaaagagattttccttggggcttgttacggcagaaggttgatggaacgggcccgcttgatttcacgggttaccttgcggtgcatcttggcggacagcccggtcacacggcggggaagaatcttgccggtttcagaggtgaacttggacagaaaatcaggattgagcagattgacctgatccatcgggatgtcgagacggcggcgcggcatctggcgattgcacgtgcggaaacgaatacggcgttctacagtcttgggttcagtggacataataataaagataatcgataagccgaaccagttaacgcatttcacgatgaagcgtgcggcgcttcaggaaaggattgtacttaatcttttccaggcggccgggagtacgcaggctttttttattgcgcgtggtgacgtagcgggacgtaggctttccttcggctttggcctcggtgcattcgaggatgatgatgtctcttggcatgatgaaaatgtgttacgggggaggatttatacactattcttcgtcatcgtcaagagaaacagataaatctacatcattttgtcctccggcaaagcccagggccactctgggacggaacctggcattctggcctttttccttttcccactgggcctggcattccacggtaagccgtgcaaaggggatggcctccagacgcagaatgggaatgaccttgtatgacatttcgcagatgccatatgttccgttgtcaatgcgggcgagcgcctgttcgatttcatacaggccgtcctgctctttggaaagcaggctgagcgcaaaatcacggtcataggcgtcactgccggcatccgcctggtgttccccggagccggaagcctcactgccttccggatgattccggagagtatcgcgggccacgccgctcatgttgtccagagccctgtcgcgcaagtccagcagatgctggcgctgcatctgcacaaaaggctcccattcggggttggcggccagttccgccctggcggcggcaatggcttccgcctgttcatccgtcaattcatttttcgcgggagcgggaaccggggcaacgggagcgggagcagcttttttaaccggagcctttccggccgttttcggcgcaggcttcttttccatttcagccgcggcggcggcagcctttttggcgggcttggcggctttttccggttcagccgcctttttcctgcagcatttcttcttggcgggagcctccaggtctacagcggtcttgcaatcggacttcccgcaggtctttttcttggaagccggaacttccttggcgacggtcttgctattggttttcttgggagtaggcataggaggtgtctctatgggctgaggttgacaatatttcacgaacagagggcggaacacgccccgctgactagactatgagacattacaaacgcccaaatgttcattcaagaaaattcagtgatgaaacaagtcatttttcccccttttgcaccctctattttcctgtcgggattttaccgggaacatacttcttttaaccttttcaacgcccggtaaaattctatattggcgttatatgacagcttcaaccattccctccatcggcattgacttcggaggcacctccatcaagatgggggtcgtcaagggcgcggaagtaatcgcccacgctccttcaatagccacccaggaatatggcaatcccgatcaactgattgaagccatagcccagttcgtgaatatgctgcggctgaatcacccggaagtgcaggccatcggcatgggaatgccgggtttcgtcaatttttaccaggggaccgtttatacgcttaccaacgtgcccggctggaacaacgttccggtaaaggacatgctccaggctgcctgcggactgcccgtatacgtggaaaacgacgccaactgcatggcttatgcggaatggaagctgggcgccggaaaaggaaaaaggcatctggtctgcctgaccctcggcaccggcgttggcagcggcctgatcgtgaacggagaacttctgcgcggggctacctgctccgccggggagctggggcagacgagcatcgactaccgggggcgtctgggccattacggcaaccgcggctccctggaagattatgtaggcaaccgggaaatagctgcggatgcacgcacgctgtatgccagccacggcattgacaaggccattgtggactgcaaccccatctctttggaacgggccgcattggctggtgataaagtagccgggcaagtatggcgggacctggccgtaaaactctcctgcgccctgatgaattgctgctatctcctgaacccggaagccatcatcatcggcgggggcgtggccaaggccagaaccctgcttttccagccccttcaggaaatcatgaaaacccagctcgccgcccctctggtggaataccttgaaatccttcccgcccagttcggtacggaggcgggcatcctgggggccgcccatctggctctcaacacccacttcggagaaacattccgggcctgatctcgtgtcttcctcccaaatactcaaactcgcccgcaaactggaattgacggcggaacaggaacgggatttcctggacgccatgcaggccgggaaccgttccagaagcgcgctggtcatcaccccgaaggcaccggaaggctacaggccgcccttgccgacaaaggacacgccgcaggagtgggggcattcctccatcttggcgctcccgtccggagaggcggaaaccaaacccggctccctgccggattacgaatgcggctattactatcccctggatctttcgtccgtctgggaaacggcccctctggcgcatcttccgtttcgtccggaacgctgcctggacatgtgcgcggcgccgggagggaaaagcattctggcgcagacgcgggtatctccgcaggagcatgtttccaacgaagtgaatccgaagcgcctgggcattctgcgccacaacctgcttcgctgcggcttcaccaatctgtacacccagcgcctgcgcccggatcagtgggcggaactggcccccgggtgttttgacctcattctggcggatgccccgtgcagcggacagtccctgctggccaaaggcattcccaaccccggctgtttcaattcctccgtcaccggaggcaacgccaagcggcagcggggcattttgctggccgccctccggtgtctggctcccggcggcttcctgctgtacactacatgcacctacgctccggaggaaaatgaacgcaatgtcctgtacctgctgaaacgccatccggacctgcacaccgtaaccgtgccggagctggagcatttccgttcctccctgacgcaggaagcctgctaccggctcatgcccttccacggagcaggagcgggcggtttcacctgcctgctgcgcaaggagggaggccatccgctcccgctttccctgccggatgaattgaaggcatggcccattcatgccatgaattgttgaaaaaagatgaagataggcattttttccgacttgcacaaccgcacagaccatctggagccagccatgcaccggatgcgcctgatgggctgcggacatttcattttcctgggcgactgcaccaccccggagagtttccggcgcctgattgaactgacggaggactttcctctggatgccgttccgggcaacaatgactacgatgtggaaaccatgcggcggatggccgccagttccccagcggcgcgcctgcatccggaacatgcctttatcacccggtacggcatgaaactttccctttcccattacccaaaatacgccttgcgggaagcgcgcagcggaaacgcagacgccgccctgtacggccatacccaccaggccgtgagcgaaagatgcggcggctgcctgctggccaatcccggagaactccagggcaggaccggacgcatcggtttcggcgtcctggatacggacacccgcatcatcaacctgcataacctggactttcacgccccatgaacacgctggacgtctgctgtgccctgattgaactgcccgccgcacggggccctcttcttctgggcgccaaaaagaaaacggggcagtccaacgggcttctttacgaattccccggcggaaaagtggaaccaggggagaatgcccggcacgccgtcatacgggaaatacgggaagagctgggatgcaccgtcttccccgtccgcatgctcacccccgtacggcaccaggagcctgaacgcattatccgccttatcccctttctgtgccgtctggaactttgcgccctgccccggcccctggaacatgaaaacctggggttcttctcccgccgtacgctggaagaactgccctgggcgcctgcggaccgccttgtgttaaaggaatggctggaagaacaccgctgaaagcagcatccccttcaaactcaatcgctccacgggaaagttcccgtccatgtctgaaaagattgcaaaaacaccttggaacattccctaccatgaggtatataaggtggtggctgctgcactcgtcatcgcctggcaaagtggcccggaccgatattacaacctaatgggggcagccccgacgcagggctgactacgtcctataccggaaaagtcaaaacagcggcggaagtccccgctctattgaggcacgggaacgtggctcacagccagagacggtgcagcggtgtcttttttccatcacctgaatccagaaagctcgttctttcaacgtttctcccctccttgagcccgcaggtcagccgggattcccctcttgggcaacattactcctgtcgggattcaccgcctttccccgctcttctcacccccgcagcatttacaggcacggagaagccattccccaaaagatcggatgcggtcaccggcaactgccgccttcagatatttcgtggcactccattcccgctccttccgtcactggacgagaaggaagaaaggaaatattattagttaataaacagcaactgttaataaacataataatcccttagacatttccggaaatcatgataggatcatgctctgttgcggaaaagtttttaacatccgtgcaactttttcattattgcgaagtataatatagtcgtgaagggattcatcaaactcatcatcgtcattgccgttctcggaggcatctggtttgcctgggaacagtggaaaggaaatgaagccatccaggtggactaccagacagaacctcttgaaaaaggagacctgatgatcaccatcgaagcaaccggcgtcacggagcctgatgaactggtagatgtaggcgcccaggtcagcggaatcatcatggagttcggcaaggacctgaacggcaaggtggtggattattccagccctgtaaaagccggtcagatgctcgcggaaatcgacaagcttcccgtgcagctggacgttcagagggcggaagcctccaaggcgcaggccattgccggaatcgcccgctccaaggcggacatccagcaggccaaagccaagcaccagcaggccagactggaccgggaacgcgcggaaaagctggggcctggggatgccctgtccaaatccagctacgaccagtatattgcggatgaagaaaccgcccgcgccaacgtagccgtggcggaagcctccctgcaggaagcggaagcctccctgaaacaggcggaagccgcgctgaaaaaggaaatgcgcaacctggaatacactaccatcaagtcccccgtggacggcgtcgtggtcaaacgcttggtcaacataggccaaacagtggtttccagcatgagcgcctccagcctgttttacatcgccacagacctttccaagctgaaaatttgggccgctgtgaacgaggcggacatcggcagcatccgcaaggggcaggaggtactgttcaccgtggacgctttcgccggccgcaaattcaagggaacggtggacaagatacggctggacgcaaccatgacgtccaatgtggtcacttacatcgtggacattgatgtacccaatccagacaagcttcttatcccctatctgacggcaaatgtccaattcgtggtggaggacatacgaaacgctttcctcgtttccaatgcggccctccgcttccgcccggaaacagaactggtcagcgctgaacaaaaagcggcctttgaccggatgcagccggagctggccgcccccgtccgggacggacaaaagaaaaaagccgtggtttgggaattgcggaacaatcttctttatccccacctggtcaccaaaggggaaagcaacggcatgctgacggccattgcgggagaaacgctccgggaaggaatggaaatcgtctctacggctcagatactgaaccgctccgacagttcgggggacggttcttccgcctccgccggcggggaaaacccgttcgcgcccaaaatgcccccgcgccgcaagccgagcacaggcaacacgaaaacggcagcctcggctggcaatgacgggccgcccccgcctccctaacccggggaaccgccttcatccgaccgctcaatcactcttttttaccgcatcaagcattccaacaacgtgatccgcttacgtgacataaccaaggtgtaccacttgggagaaatagaccttcaagtactcaagggcatcaccttggatatcaatgaaggggaattcgtctccctcacgggggcatccggctcaggaaaatcaaccctgatgaatatcctgggctgtctggaccgccctacctcaggccattactatattgccggggaagacgttgccaaattcaacgccgcagaacgcgccactctccggaacaagcgcatcggattcgtcttccagaactttaacctgctctcccgtaccacagccctggaaaacgtgatgatgcctgccgtatatgcccaccccaccctcagcatgaaagccatgcgcgaacgttccgtggaattgctgaatttggtaggcctttccgaccgcatggactacaccccggcccagctttccggcggacagcagcagcgcgtagccattgcccgttccctcatcaacaaccccagcatcctgctggcggacgaaccaacgggaaacctggactccaccacttccaaggaagtgctgcacatgttcaaggacctgaaccgccaacagggaatcacagtcatcctggtgacgcacgaccccaaaatagccgccttcacggacagggccatcaacatggcggacggccttatctgcgaagggatttccgatatgcttagcaaggacgacgtatgaaattccttcctctccttaaaacctgcatcagggccctggtgcgcaatcccatgcgcgcagccctcaccatcctgggcatcatcatcggcattgccgcagtaatcgccatggtggaaatcggccagggatctacgctccagattaaaaataccatcgcttccatgggggcggacacgctgaatatccgccccggagccatctccaaaagcggcgtcaataccggcgcgggcggacgggcctccctgaccaacgcggactgcgaagccattgcgaaggactgccccatggttctgcgggctacccccgtggtgcgcgccagcggccaagtcatttacggcaacaagaactggagcccggaaactgtagagggcggttccgtggaatacctgaaaatcaaaagctggtatgacatggcgcgaggccagcccttctccgaggaagatgtggaacaggccaggcgcgtgtgcgtcatcggccagacggtggccaaggaactcttcggggacgaagacccgctgggcaaggatatccgcatcaagaatgtcatgttcaaagttatcggcatccttcagaaaaaaggggccaacatgatgggacgcgaccaggacgactccatcatcctcccgtggacaagtatccgctaccgcctccagggcctgggcggcggttccacctccacttccaccggcaacaggaccaccaccttcaaccgggcagataaatacaccgccagttccgtggattactacacggaaactacggaccagccctatacggacgctccccatccgcggcgcttcaacaatattgattccatcatggctcagatttcagacccggaacgctcctccgaggccattgaccagattacggaagtgatccgtgccaaacacaacctcaaggacggccagctggacgatttccgggtatgggacatggcggaaatgtcccgcgccatgagcagcaccacggaagtgatgaccaatctcctgatgatcgtggccatgatctctctggtcgtcggcggcgtcggcatcatgaatatcatgctcgtttccgtcacggaacggaccaaggaaattggcctgcgcatggcggtgggcgcccgtccgcaggatatcatgcgccagttcctgctggaagcggtgctgctctgcgtggtgggcggcgcgctgggcatcatgctcggcaaggcgatctccatcatcgtcagccgcaccatgaactgggccacggcctcctccccggaagccatggctctggctgtaggcgtctccgtattcatcggcctggccttcggatggtacccctcctggaaggcgtccaagatggaccccattgatgcccttcgccacgaataacaccttactttttatttttccatgtcatccacgttcaaacatctcccccttctgaccgcctgtttccttggctcctgcatggtaggccctgatttccggacgccgaccaatgacctccccgccacgtgggaggcgaacaggcccccccacagttcggacaaagatttgcgttcctggtggaatatctttggagacccccagctcaaccgcctggtctccacctccctcaacaacaatccggacatgaaggtggctttgctccgcatccgggaggccagggaaaagctccgcgtctcccaggcatccctgcttccctccgcagacgccagcgccgggtggagcctgtccccggacagaggttttcgcagctccacttcccagaacttctccctgggagcgtccacctcctgggagctgggcctctttggcggcaaccggcgttccattgaagcctcccgcgcctccctcatgtccacagaagcttccgcaggggccgtgcgcacagccctgctggcggacgtcgccacggcctactttgactggattaccgcctgcgaacagcttcgcatcgccagggaacaactggaaatccaacgcagcaccctcaccattgcggaaaaacgctacaaaacggaattcgccccccgtctggatgtggagcaggccacctccaccgtcgcctccacggaaagccgcatcccgcaactggaagcacaggtggcctcctctaaaaaccagctcgccgtgctgctgggaacatacaattcccgtgtagaactgacgctgcccaaagcttccgtctttgagaaaacgcccgtcgttccggtaggcctcccctccgaactcctgcggcgcaggcccgacgttatcgccgctgaggcggacctgcacgcggccgtggccaacgtgggagtagccgtagcggacttgtacccgcgcttcagcctgacgggttccctctccagccgcggcggagatttcgtccagctcttcagggaaaacaacaacgcttggtccctgggagggaacctgctccagcccctgttccagggcggagccctcagagccacagtacgcgcccagaaagccgcagcagaacaagctgcggaaacttaccgcaaaacgctcataaccgccgtctccgaggtggaggacgccctgatcgcctatggcagctatacctcccagatgcaatacctgcacaaggaaaacaacgccaacagagaagcgttccagctctcccgcaccctgtacatcaacggcgagacggacttcctgaacgtgatcaccgcccagcgttcctggctcagctcggaggaatccctggtcaccatgaagcagaacatccgcaaggccgtggtgcagctcgcgcgcgccctgggcggagggtggtaatcagccgctccctccaaaggccggggtcgccatccccggcaaacggaaccctgatttttcaacaggggacagggcagcaagggaatgactgaagaatcattctttgtccccccacgttcagattaaaaaaggccgcaagaacaggaacgaataaactatccggaaacttccgatggaattgagcagatagccaggtctcaggttaagaacactctccagccacttctttcatgactgcgctgataaggttccgggtcttcacgccgggcaacacgttcaagtccatgcggttcatcgcgtagccaaaggaaaggccgtgggccggatccgcaaaggcatgggaaccgcccgccccggcatgaccgaaaccgccggagccgaacagctggcgcagcttgcggcccgtggcggggtctgcgggatcgtgcatgaagccgcaggaaaaggcggtgggcgttttcagcgtcaggtccggcccgtcaatgacgacgttccgcatccagccgcgcacgtcggacgggaatacccggagttcatccagccccaggcaggcctggtagaactgcgccatgccgcgggcggaagccacgccgccaaaggccggaactccggacacccacgcttccggcgtgttcatctgccgcacactgttcagccctatcagagtattgaacgcacggtttacgggcgtgcccttgttcatgtattccagataaaacggcgtacccatgttggacatgtccatcttgccgggatacagcgtcgccacgcggttccattcggattccggcaacccgatgtaaaaatccagattcaacggtttgcggatgcattcctcccagtaacgccacaggcgttccccggtcagccgcagcatgagttcatcaagcatcactccgtaagtatgcggatggtagccgtgttccggcggctgccacgccggaacggtttcctccagggcgcgcacgcaatcctcatggtcaaacacgcttgccgtccgggagaaagccgccaaaccgcattgatgggacatcatctgcgcgatggatgcatagggcagcgggaattcaggccacagttcccccatgctcatctgcggcgaggctccctgctggtgcagggccagcagaagggtggcggatgcggctcccttggtggcggagtaaacgggcaccagcgaatgttccgtccatggacgcgttttatccgctgcggcaaacccggaatgcagggaaacgatttcccttccctccttccagacagaaacggaggcgcccaattctccgtagttacggaaatttttcctgaaaagcttcagttatctgccggtactcattcattcccttaaaatgacccggcgttactcccggcgtccggacaggaaaatactcccctccggctccgaaagcaagctccggcgctgccctggatggtcagcgccggaacaggacaagctgtaaaacatcagtctttcgtatgggcggccaggtatttcctggctcccacttcatccggatcctccttcagatcattcagggaaaatttaatacggaataatctcatgatgaacacataagaacatggaatcagaaaagcgcccaccagtgtagccacccccatgccaatcaccaccaccgtaccgatcgcgttgcgcgccagagctccggaaccggaggaaagcatcagggggatgcatcccagaacgaatgccagagaagtcatcagaatgggacgcaggcgcagacgcgcggcagccagcgtagcctccatcaagcccttgccgcgctgcatctccagattggcgaattccacgatgaggatggcgttcttggccgccagacccaccagcatcaccagaccgatctgcgcgtagagcgtcagctccatgccctgccagaacaacccggcataggcccccagcacggcaatgggaaccgtgaggaaaaccgccaggggaagagaccatttctcataaagcgccaccaggataaggaaggcgaaaacggcggacatggtgaagatggcccccagcccaatactgttgcgcactttattttcctggaaactcatgtcctggtagtcgaagccaaccttcgtgggatccatcgtctgatggaacacttcctccagcgcatccatcacctgctgggtggagtggccgggccggggcatcacgttcaatttggcggcgttgtagatgttatggtgcatcacgaattccgtatcctctatctctctgatgttcaccagggcggagagaggcacgcgggctccgtccgcgttcgtgacaaagaagccgtccatcttctccaggctggcgcggtcttcgccctgcgcctggatatacacctgccactgctggccgaaggcattgaagtaattgatgaaggaggaaccgttgtaggaggccagaatgccgttggccacgtcaatatccaccttgtggaatttgcatttttccttgtccaggttcacgtacttctgcggcatgtccgccatcatcatgtctatgcacaaggctatttccggacgccgggaagccgcttcttggaaccgttgcacctgttcatgcagataagctacgccctgcccttccagatcctccagtaccatcgtaaccccgttggcggttcccacgccggggatggcgggaggttccagcaccatcgccatgccgtccaggccggcctgggccagctttccctgaagctttccggccagctccgcggaggtttccggccgttcgctccagtccttgagctcaatgtaggcaatgcaggcgccgggagtctgcacgttgttgaggatgttgagccccaccacggtagtaaggttcttcacggcgggatcctggagggccgcctcaaattttttgtcctgttcataggcaacctgcagggaggtattcggcttcaggatcaggcaggccagcagaaagccctggtcttcatccggaagaaagccgccgggaacacgctccgccacaggagctaccgccccccagaataacaacaggagggggatggaaatcgccagcttgcgggccaggcttccgcacatgcgggtatagccgttggagacacgtccgtaacaccagttgaacaaacggtgaaatggggaaaagaggctcttcctgcccgcattccggggtttcagcaacagggcgcacaaggcaggggaaagcgtcagcgcattaaaggcggaaatgagcatggaaatggcgatggtcacggcgaactgcttgaacagcgttcccgtgatgccctccagcagcagggaaggcaggaacaccgccgccagtaccagggcaatggcaatgacggggccggatacctcctgcatggcggcgaaggaagccatgcgcggattgagccccttgtctatgtgctcctgcacggcttccaccaccacaatggcgtcatccaccaccaggccgatggccagcaccatgccaagaagggaaatggtgttcagagaaaaccccaggacgggaaagaggcagaacgtggaaataagggaaaccggaacggcgatgagcggaatgagggtggcgcgccagttttgaaggaaaacatacacgaccagggccaccaggatgacggcttccatgaacgtgtgcttgatttcatcaatggaatagcgcaccgccgtagtcgtatccagggaaacgcgcccggtaattccttccggcatcagcggagccttggcttccagcagtttttccacgcggtccgccgtagcgatggcgttggaacccggagactggaagataacgatagccgcggaaacttctccgttcaggcggccggtggcggaatagtcttcagctcccagttccaccttggcaatatctttcaggtacaggatttcatccccattctggcgaatgatgatgtcttcaaattcatggggctccgaaagacgcccctgagtgcgcacggtaatggtctgctcctggccgtccggcacggggtccgccccgatcttgccgccggggttggtggtgttctgggcggagatggcgccccgcacttcattgacggaaacgccgtaatgggtcattttggacgtatccagccagatgcggatggcataacgccccgcgccgtacacctgaacttcccccacgccctccacgcgcttgagttcatccaccagcttcacctgggcatagttcgccaaatccacggaattataactgccgtccggggatgtcagggaataaatcatcagcggaagccccggctgctgcttgatggtcacgcccgtgctctgaacttcctgcggaagctgggaggaggcctgcccatagcgcatattggtcagcacctggtcaatatccgtatcggaacccggttcaaaaatgacggaaaggttatacacgccgttgttggaggaaacggacgtcatgtagtccatgccctgcacgccggaaatctggcgttccaggggagtgcccacggaatccgccaccgcctgcgcgctggcccccggaaacatggcctgaagctggatggtgcgcggcgtgatttccggatactgggaaataggcaggttgaacatgcagaccagccccagcagcgtggtcacaatggcaatcacggctgcgattgcgggatgcttgatgaaaaacgcactcatggcttatttggcagttacggaaggagtggtggaaacaggggcggtatagatgaagggaacggggacaaccgtcccgaacccttccgtggcaccatgttcccgcatcaggctgttcgccttggaatactgggcggccatcatgccgccttccacgatgacgggagcatccgccggctttccgtatcctatttccttcagagattccggaatgggcttgaccgttcccgtcactatctgcatcagcatgggggccgttccgcccttgccgtcaggcatgtcaaggactacggtttcccccggctgcacgtcaatgcggcgcggcgtcccgtccggagccaccaccatgatgttgcggtggttcatggaagaaagcagggcgcgggcgggaaccagcaaggcatccttctccgtacccgtcacggcgcgcacgcgcaccgccattccggaacgcagtttcagatccggattgggaatatggccgatgaaattgacggtgcccgtcgaacggctcacctcgctgtccacggaaaccaccttccccttcttttcaaagacggagccgtcttccagaatcagttcaaaatccggcatgtctcccatgcgcccggttttcacattcacggttccatccatcagacggctgagaacctgttttcccgtcacggaaaaatccacccggatggggtcgatggaagacatggtagtgagcggcgagccgctggcggaaatcagttcccccacgctggccgtcgccttggaagccagtccccggaacggcgcgcgtactttggtgcggtccagattgatccgggcgttttccagggaggcttccgcctgcttgatgcccgcttccgcctgttccagagcagcctgcatctccttaaggttctgttgcgcgtccgttaggttcttgacggaaatagcccccgtcctgatcagtttgtcatagcggtccaaatccttctgcaccctgttcagagaagcttccgcctgaagtttgacggcacgagccgtagccaggttggccgcctccctgtccacggcggcctgataggtagccgggtcaatttcaaagagcagttctcccttgtcgcaaatggagccgtcccagtaaacctggcgtatcagcgttccggaaacttgcggcctgatgtccgcctgctccaccccgcgcaaatggccgaaccaggaagatttcaactccaccgttctctgctccatattcatcacggaaaccttgagcggaggcatttccctccggtttgcagcatccgcggcgccgttgtcttcccggcaccctgtcagcccgcacagggccgctatcagtatatagtgtgctttcatgttgttggttaacaatattattgaagcatgcttcatatttttccaaacccgttccccggaaaaaagcacgggcttttattatttgagattgtcgtacatgcgccggagcagatccctcagcatgctgcggctttcctccggcaccccgtccagcagcgtattttcaatcactcctatctgctgacagatggcctcatgaacgccccggctcatatccgtcaggtacacattcttcagccgtccgtcttcactgtcaaaagccgtggttacccagcccttctgttccagcctctggacaattcccttggccgtggtatgggagacacccaaatgccgctctatgtccctctgggagacgttttctccgtcacgggacatcaggtaagccagcacccggccctgggaggccgtaacacgctccagagtcaagccgcgcgtaagcatcatatccacgcggtccgtaatcattttcatcaaaaacgaaatcgtaaaagggtcggccataaaacaatgaagcatgcttcaaaaatgtaccgacaggtactctttatccggacgcaagtcaagcggaatcagaatgacagagcgcgtgaaaaacacgttggcctcaccagtaaaaataaatcaaaggccggaaccgcttcgccttctttccagggacaatacgcacagccgctttccctctaccttgaatttcacctcccagccagagaacaaaaggccgtaaacccgttccggatcatcctgatactggggacggggatccagggacagcgtatcttccagtgcactcctctcttccggagacatggaaccgccaaaagattcgggaatttccacatccagccgttcataggggacagccgtaaacccttccgacgcctccggaatgcagtccgccagaggaacatagggcttgatatccagaatgggggtgccatccaccaaatccacgccggaaagatgcaataccgggccgtccagaggatgcaattccacccgttccagcctgacggcagacaacccgatgggattgggacggaacggcgcacgcgtggcgaacacccccatgcgcacattaccccccagccgcggaggccggaccgtagggctccaccccttatccacgttttcactgaacacccagaccagccacagatgggaaaacccttccagaccacgaacggcatccggatggcggaacggcggctcaaataccagccgcgcccgcgcatccggaaccaggccgctctggcgcggcgcaccgaatttgtccggataacacgtgctgacgcgggcgacgggctgcaagcggagactgatagttaataattaatagctgcctgcctttctccgtgacgctttcatcagaagcggtggagctgttctccgaacaccacggcatccacttttcccttcaaggtcttgcccaggaatggagtattgcgggcgcggctgcggagcgtttcatccgtgacgggcgtttctccttccgggtcaaacaccaccagattggccggagccccttcttccagggagacgggggccagccccatcagcctgcggggagcatcgctgcaggcgcgcactactgtctgccaggacatttttccaggttccaccagatactggtaaatagcgggcaggaacgtatccagcgcaatcatgccctgcggggcgacaacgaaatcctgaagtttggaaaacggcgtgcagggcgtgtgatcggaaacaatgcagtcaatggtgccgtcattcacggcggcaatcagggcatccacatccgactggtcgcgcaggggcggcagcgtcttgtagcaggtatcgtaccggcccacgtcctcatgcgtgaacaggagatggtgaagcgccgcttccgcgctcaacccggcggttttccgcttgcagcggcgcaggatatccacgctgccggccgtagagacggtctgcacatgcagagagttgcccgtatccacggaaaggcggatgatggtttccagccctatttcctccgcacaggagggggagcccatcaaccccagacggtaggaagtagtgcccgggtgcatggccgccctggccgtcagggacggcacgtctccgcgcagggcgaaagtaaggttcagattgctggcgtactgcatggcgcggtacagcagcagcatgttgtccggcgcacggtccccgtccgtgatgaaacggacgcccttggcgcgcagggagtcgtaggaggcctgctcttccccgccgtcccccttggtcaggcacccggaggggataacctccaccagagcatccgtccggcatatttccatgaacgtggtaatctgggcggcattgtccatcacgggttcggtatccggcatcgccatcagtccggtcactcctccatgcagggcggcggcggtagccgtagccacacgttccttgtcctcccgaccgggctggcacaaatgggcatggatgtcgaacaggccgggcagaacaagcttcccggaagcatccagcgccttttccgcggcgctctccaaaagcgttccggcaggagctttcgctgtaatcacccccccggaaaccagaaggtccgccggggcggaaccgtccgtcagccgggcattgcgaataagtacggaagttttcatgaacaatcagtgctgggtttgcggagtgagatggtaaaggatggacatgcggcaggcgatgccgttttccacctggcggttgatcaggcagcgctcatagtccatcgccaggtcacagatttccacgccgcggttgaccggccccggatgcatgatgtacaggccttcaccggaaatgcgcttcaggcgttcttccgtgacgccgtaaatcttgttgtactcccgggcgctggggaagaaaggggcgtcctgccgctctttttgaacgcgcagcaggtaaattacgtccggcttccaggcaaacgcctcattgaaatcggaaaaacggggaatgccggaatgttcggtgcgcggcaccagggaacccggccccaggaaggcgacctccatccccagcctcttcatcagcagggaggtggaacgggccacgcgggaatgcaggatgtcccccacaatcagaacgcgctttcccctcacatccggaaatacctcccggatggtaaaggaatccagcagcgcctgggagggatgggcgtgggctccgtccccggcgttcaccacactggcgcaggtatggcgcgcaatcacgttcggcaagccgctgttgtaatggcgcacgattacataatccactttcatggcctggagcgtggcgatcgtgtcctgtacggattcccctttcaccacggaagaggtggacaccgtgaaattggtcacgtccgcagacaggcgttccgccgctacctcaaaagaggaacgggtgcgggtgctgggttcataaaaaagcgtcagaacggacttgcctttcagggcgggcacctttttgacgcttttggtaaaaagctccttcatcgggccggccgaatccagcagcgtgtgaatttcctcgtcagtcaatgaggagatattaagaagatccttgcggggatgattcatgggaaacggagaatggattggaaaattttcagtgggagggaatgaccacgctgtcctcgccgtcagcctccttcatgcttacgatgaccttggctccggcatggtccagcacgtgacccgtataatccggctggatgggaacttcccgccctccgcggtcaatcaggcacgccagttcaatacgggccggacggccgtagtcgaaaagggcgttcagagccgcacgtatggtgcgccccgtataaaggacgtcgtccaccagcacgaccctcatgtcatccgtggaaaacggcaaattggaggaacggagggaaggccgggcttccagcttgaagatgtcatcccggtacagggaaatatcaatagagccgtactgggcttccactcccagctcctttaccttgtccaccagacgccgggcaatcacatccccctggctgagcaggccgacgatggcgagaggttctccggggaaacgggccacaatgccgtgggccatgcgctcaagcgcacgggaaattcccggaccgtccaatacgatttcctgtgaaggaggggtcatttgccggatgggggaaaaagttcacgttacagccccgccagttttaaaatgcggtgggcggccatggcggcattgacgggggttttcttatgcaagccaaccgtagtgcagggcacgccgccgggacactgggcaatcgccagcagggcgtcaataccgttcagggggcctccggggaccggcacgccgataaccgggagggaacagctcatcaccaccacgccgggaagggcggcggacaggccggccacagccaggataaccgctttttctccgctggcttccaaatcccccaggaacctgatcagctccggaaggtcgcggtgagcggacagaacggtttcttcataaggaacattctcctgagcaaaatactcgcgagccggttccataaagggcttatcattcgggctgccgtagatgacgatgactttcatggctgtgtatgcggttgtgaaacttgcagattatgcccccaagccccctgccctggcaagacttaacctgcaaaaaaaggaaggccccgggtggaaatgaacaacgggagaaaggaaacacaggagttccggaaccgttccgggaaattggcccggcatcccggtcattcctccaacccagattcgcccatccctccgccctctccgggaaccttcagttttccggagaggatatccttcctgatacggtaaagagccttcaacctttccttatcatccaatccttccgtttcccgcatcaggtataaagaaaactgtacggaacaattctccagccgatatttttccagaatgctcccccccattttcatgtattggcctccgtactttccgtaagcgttctgaatttcatcggcagtcatcttctctctttccacccgttccagcaatttcccggactccctaatcatcttcagatgcatggcgcggtaatcggaagggcatttatccagaatcccagcccattcgggagattgaatatatttcagcgtggccaccagcaccgcacgattatccttttcctccaactccacaatgcacgtccaaataatgcccagctgcaaatgcctggccatggcctccctgtacgccgctattttcttttcatcctccatttccaaatccacattagccatggagggcgccgctatatcctgggacatgccggaaaaagtcatcaaaaacgcagggagaattccccaccggaacagatttgacatgaaaccacgttacaggaatcttttgcgcagggtcaacaatattcttcccttccgcagcatcccgcagcattgacggccgccgccacggcggactgtctttccttcccggaaaaaacaagcctgcccccattcccggcttgatggcatccgggtccggcataacaaggctcacaggggcgtatcttcatccagaaacgcagaaaagctgcatcgctccggcggccggacgcttgaaaaaacctagcgggtcgcctgctgcgccatggcctccgcacaacggcgtccgtccagggcggcggaaacaatgccgccggcgtaacccgccccttcgccgcatgggtacaggccttccagaccgggatgctccagcgtggcggggtcccttggaatgcgcacgggggagctggtgcgcgtctcacagccaatgagctgggcgtccgctccggcgaatccccgccatttacggtcaaactgccgcagcccctcccgcatgcgccagacaatcccttccgggagcaattcatgaaggggatgggatacgatgccgggatgatagctggtaggcagcagggaagaagaaacgcgccctttcagaaaatcctccaccttctgggccggggctttctgcatgcctcctccggcacggcaggaagccgtctccagcactttctggtacgccacgcccgccagcaccccgtgttccctgcaaaacggttccgtatcttccggatgcacgctgactacaaaaccggcattggcaaatggagaatccctccgggccagagacatgccgttgaccaccacctcatcgttctccgtggcggcgggcacgatgaagccgccgggacacatgcagaaggaatggacgccgcggtcctggatggtggtcgtcacggaataacgggctgccggaagctgctccgggcgcctctgctccggattcaggtggtactggcgcgcatccacaaacgcctggggatgctcaatgcgcacacccacggcaaaggatttctgttccagagccagcccctccgccagcatcatgcggtacacgtcccgggcactgtgcccggtagccagcaaaacggaatccgccgcaaattcccggccatccgcgcaggacacgccgcgtatgcggcggccgtccgcagaacggagcagatgctccacacgggcattgaaatgaatttccccgcccgcgcaaaggatggattccctgatggctttgacgacattgggcaacagattggagccgatatgcggatgggcgtccgttaaaatttccctgggcgctccgtgggctacaaaaatctcgtaaacctcccggacggggcctctcttggtcgcgcgcgtaaacagcttcccgtcggaaaacgtgcctgcccctccctctccaaaacagtaattggaatcctccatcaccgtgccgcggcgcaggatgggagccaggtcaaaccggcgggaggaaacatccttcccccgttccagaaccacaggcttcatacccagttccaaacagcggagcgcggcgaacatcccggccggtccgaatccaacgatcagcgccacgggggagccgggacggacggacggataatcccgggagggaagacgttccggcggcagcgggctatccaccccgaccagcagccgaagctggaagagaatttttttctgccgggagtcaatggactctttcaccagccgcacatccttgatacgggagggggaaatacccagcttccgcgccacggcagcgcggcgcacgcgctcgctgccggccttttccatcggcagaatcacatccaccgttattccttcccctccgctcacagtccctccttccccggccggggctgctgctgggtgatgcagtggatggcgccgccttccagcaccagcttgcgggcatccacccctattacctgttttccgctgaaacattcacgcaaaatgcccagggcgcgatcgtcattccggggctggttgaatacggggacaatgacggcctcattaacaatgaggaaattggcgtaactggcagggagctgatccaggcgccagtcctccgcatggagaggatccggcatcggcaggggaatcacctccaccccggaaccgtccacgcatctcaaatcctgaaggcgttcattattctccgccaaagcgcggtaatggggagaggaagaatccgtttccacgatggaaactacggcatcccggcacacaaaacgcaccatgtcgtcaatatggccgtccgtatcatccccttcaatgccggaaccgagccagaaaacggctctgacgcccagcatgcgcttcaattcctcctcaatcatggcccggctccaatccggattgcggttgggattcagcagcacggactccgtcgtcaccagcaagccgtccccattgccctcaatcgcccccccttccagaatcagggaagaactgcgcacgggaagccccagcgccgccccaatcagggcaggaacgccgttgtccaggtcccacggggcaaatttgccgccccacgcattaaattgccaatccgccagcatcagggaaccatccttcacatcctggacgaaaacggggccgtggtcccggcaccatacgtcgttggtcgggtggttgaacaggcggaattgctcctcactcactccggcggccagcatcgcctgcctgacgccgggatgaaggggagccgcggcattcacgcatacaagggcatgcggagcaatggcagcggccacgctcccataagtctgctgcaactcgtccagccccccttgccataaatccctgcggtggggccaggacagccagacagcatcctgaggctcccattcagcgggccagcgtacatcgggttccttattcatggcggtatcgggcggttcaactgggctagtcctgaaattcataaggttcttcaaaagccttgcggaagctcatgaagcccttgaaatcatccagggaatcctccggctgtttggaaaaaatgtcttcctcaatcagtaaaaaaaccatctcccccacattcttcccgttcctaagcccccattccttcatcacggtggaagccatgggcccgaactgggcgagggcgtaatcccggaacccctccagcagttcctgcccgctgacatgcctctgagagccgttttccctttcttcaacacgctgcatggtaaaatccagcgcatctttcagaaaagaatacgcccgttccgcaaaacggggatccttccgtacgatacggctcacggcatcttcaaacgtaggggtggtcatagcggctcgccactaccctatacggccccttgtgaaaatcaagatttttgggagcgctccagcttcagccctcccttggggacagcatggggaaaatgaaggcagccgccccctcgctggaacggaacgccggacgcggcagacggtaaaatgcccgtccatgatatagagcctcaaaaaacgcacgcgcccgcattttgaatatcatgcttctgcatgagcgaccctccggcaggcagcggtttttacgttctgatgccgtcaaaaagccctgtaagcaggaaggaaaccttgccagcctatggtctgtttgttatgaacggaatactttatgttccgttcctccatcatgcttctggcaaccatgctgtgcgtttcctgcgtatcgcaccggcctatccaggacagcagctccccgcccattgacgcggccaatcccctggacggcacccccgtggcgctggcgtggagttccggaacgcaattaatgatgggcgtagacacgggagcagtccagacatccctgcttttctccccggcagtggaatccatcggcgcacgcctgcgcggcaggggcgccatgcgcacggccaacgtgcccgtttccctgaaggatgacggagaacccatttcccggaaacaggacgtagtaatggcagaccaggccccgtatgacggtttgctgggctgggaatgcatccggaaatatgtgtggaacatcaactatcccaaacgctcccaccgttttttcaataaacttccctccagaataaaaagctggaacaagctttccctgattcccgggtccgactatccgcaaatcgcggacaggcacggaaggcgcatcattttggacacgggagccccccacgccgtttacatctccaaaaaacgctggaatgccattaagcaggcctacccggatgcgttcgtcagcgtctattccggctacagccccgccgcaggcggcttttacgcccacgaatgcatgcatgtaagctccttccagctcggtccactggaattaaaaaacatcctgctctgtgaaagcttcgccaacccggaagtgatgggcatccccgatgacatcgacatcatcctgggctacggcgctctggccgcacgccagttctggctggacggcccggggaacgccctttatttcagctccaccagccaccggatgcccgcccccgcctccttcaacctgatgggaggcacctttatccaggacagcaacgggaacggccccatgaaagcttacgtggcagagtggtcgcccgcatgggacgccggcctcagaacgggagatgtgcttatttccatcaatggaagaaagaatccctatccggacctcgtagaatatgttaccacccagcggggggctcaggccagcgtggtggtccagcgcaggaacaggctggtgcgcatccaatgggaagttccggccgcgccccctgccggggattattaccccacgccccaggccattacggaacaggaattcgaaaaccacgtcaggcagcaggaaaaaaaagaacagacccagccctccgcagacggccagcagcctccggctacggccggagaaactccggatgaagcctctcccgcagctgacgggaaaacggacaaggcctccgctgcctgagccgggccagcaaccagccatctctctacaccggcatgaacaacgaacaacatcagaatacccaaacttccgccgcccccgccattccctcccctttccagaagaaaacctgctggcatgccctgacaggcgtatccattctggtgatgctgggcattgcggccttcgtcatttttgaagtagtggaacttctggggtttctggaaccggtgctcctgcccatcctgattgccgccgtcgtggcgtatttgctggaacccatcgtttcctggctggtgcgtctcaaattctcccgtccatgggccgtagtcacggtcatgtttgcggctctggccgttctggtaggctttggagccacgattctccctcccctgatcaggcagacggatgaactgatcgacaaccggatggagctatgggacaaaacctccgaactaattgactccaccattgaaatccccttcatttcccgcaccattgacagtgtttacagcaccagcctgcgggaactgaatgccagccattatacggaagcggaagtccatgacctgagaaacgcccggaccgcccgggaaaagctgggagcctacatgaccatcaattcctccttttaccaggacaagctgatgagctggctcacttccgggggacgggccctgtacagcaccataggaatcatggtcagcatcctgatcacacccattttcgctttttactttctgctggaggcggataaaatcaaagagaaatggcccagcatcctgcccctgaaagtctccaaattcagaaaagacgtggtggacaccatggaggaaatcaacggctacctgatttccttcttccgcggccaaatgctggtaagcatcattgaaggcattctgatcgccatctgcctgaagctgatcggcctgccgtacgccatcaccattggcgccgcggtctgcgtactgggcatcgttccctacctgggcatcatcaccgcctttatccctgcggtgctgctggcctggttcacatggggggatttccagcacgtgctgattgtttcgggcatcttcctggccgtcaaccaatttgacggatggatcatccagccgaaaatcgtgggggattccgtggaactccacccgctcacggtcatgttttccgtgttgatctggacactcatcctgggcggcttgatcggcgccctgctggctgtccccctgacagccgccatcaaggtcctttacaagaggtacatctggcagaatgccagcatgcgccccatgacggaacccgtgcttccgccggaacatcccggcgaacagcctccggacacccccgaaggttcggcccacgcttaaacagcggcatccttccggccgtcctttccggaaaattataatcacacacacccgacaacatgaataaatccgcattacacctgatgcttgccatcgcggcggcagcggcctgcccggccgcagccacgccaacggtcaagccccccaaggccatcgtcatgatttacgctgacgacctcggctatggagacgtaggctgctatggagccaagggaattcccacccccgccatcgacaagcttgccgagcagggctgccgcttcacggacgcctattccaccacatccgtctgcaccccttcccgctatgccctgttcacaggggaatatccgtggcgcaaggaaggcacgggcatcctgccgggagacgccgccctcattatcgataccaagaagcccaccctgcccaagatgctccaatcccacggctataaaacctacatgataggcaaatggcacctgggcctgggggaaaaggggaagaagattgactggaacaaacatatctcccccagcccgaacgaaatcggatttgacgagagctttatcttcgccgccacgggcgaccgcgttccctgcgtgattctggaaaacggcaatgtccgcaacctggacccgaacgaccccattgaagtatcctacaagcacaacttccccgggcttcccaatggcaaggacaataaggaccagctcaaactcatgtggagccacggacacaaccaggccattatcaacggaatcggacgcatcgggttcatgaagggcggcaaaagcgccttgtggaaggatgaggaaaacgccgatgtcattacggataaggccattgaatacattcaaaaaagcgccaaagccaaggaaccgtttttcctgatgttcgccacgcatgacatccacgtgccgcgctgcccggaaaaacgctttgtgggcaagagccggcacggcgtacgcggtgacgtgaccgtggaactggatgactgtgtgcgccgcattacagaggctctgcaacaggccggtctggaaaaagacgccctggtgatcttctccagcgacaacggtcccgtgctggatgacggctacagggatttcgccgtccgggacaacgccacccattcccccgccggccccttccgcgcaggcaaatacagcattctggaaggaggttcccgcattccgtttatcgtcaaatggcccggcgtgatcaaacccggaaccacgagcaaagccctgctcaaccaaatggatctgggggcctccctggaacagctgctggcccccggcaaggccaattccttccgcgactctgaaaacgtgatgcccgcccttctgggaaaatccgccaaggggcgtgactaccatgtcatcaacagtaccggcaaggcattggcgattcgccacggcaaatggaaattcattcccgccggcgtggccattcgcgacggcatcaacggagcctccgcaaaaatgagcaagtccccggaaggaggaagcctctttgacctggaaaaagacccaaaggaacttgacaacgtagcctcccagcatccggacatttgcgaacagatgaaagccaagcttgaggaaatccgccagaggcccgaaaccaaggctgaccaggaggacctgcttcccttggacgactaacatccattcgggccagatcatgagagaatccgccacatgctcccaatgcggccacgggtacacctacccggccggattggacgccaaaaccggcatgcgctgcccggcgtgcggcgttctgattcacgttacaacggggcttcccttcggggaagcctcttcttcgccatccggccgcaaaccggaaaacgccatgaaaacgcagcccgccctgcctcccgtcaggaaaaagcggccgtctttctccggacgcgatactgacgaacgcggcatccggcaggaaaacctgccgcagcggccagccgcagcatccggccgccggattcccgctacatcatggctggcatgggggctgtccctgatcgcgttgattctggcctttattttcccctcctacggaaacggttccacagatccgctgtacatgcttcagtgcctgccctccatggtattcggctgcactgcggccatccttttcatccagggcctggcggctatgcgccgctaaaaaacaaagcctgcggccccatccggggcccatgcggcagccccgtcccaaaaacggccagaatgcctggtttccatgcccctttccgcggaaccgggcttttaggcttgcctgtcaaatgaacagattttaagttacgtcccggtaaacgttatggaacgggaggcagaggcgaaggacaacctgtggagggccaaactggatgccgtcctgatgcacaggatatggggttcccttattttcctgggcatcgtttatattattttcttcctgagcttcgctatcggggatcctctggtcaggctcatccagacgggcacccagctgttcagcgtctgggcctgccgcatgctggaaccgtggccccgcctgcaatccctgctgggggaaggcgtggtaggaggcgtgggcggcgtactggcctttctgcccaacgtggttctcctcttcggggccattaccgttctggaaaacagcggatacatgatgagggtttcccgcctgatgagccgcatcatgaaaatcatggggttgaacggcagcagctttgcccccctcctgctgggattcggctgttcggttcccgccatcctgtccaccaggagaattgaaacgcgcagcgaccgcctggtcaccatcgccgtgctgcccatgatgagctgtgcgggccgcctgcctatctacatgatgttcgtctccgccctgtttccctcccgcctgcaggcccccgtgctgttcgggatttatgccagcggcgtcctgctggcgctgtgctgcgcccggcttctgaaaaacacgcttttcaaggcgccccagagggattccctccaccacatgaagcgcctgcgcctcccctccctgcggaaggtgggcatcctgatgtggtcacgggctttcatgtacgtccggaaagcaggcactttcattcttggagcctccatcatcctgtggtttctgaacacctaccccaggccggaagaagacacggcgccgacaaacgcagcggccatggaacattcctacgccggacaaataggccattggatggaacccgtcacgcaagtggccggatttgactggaaaatcaattccgccctggtaggagcctttgccgccaaggaaattttcgtcacccagatgggtattctttatgcagtggaagacggaaattcgggcccggcggcccagcagacattgaacgcccgccttaaagccagctacacccctctccagggtatcagcatcatgatattctgcctgatcgccctgccctgcatcggcaccgtcaccgtcgccaagagggaagcgggcacctggtggttcgctctggctcaattcggcggattgaccctcctgggttttgcaacggctacgctgatctaccaggcagggctccttctgtaagggccagccataaagaaaccggaagcagggaatacccccccggaggaagaaaaaatgaacctcgtggaaaaagaggcgcttacgatgcacttccgcaagttctcctgctctacggtcaagctatcacaacctcgtcatcatccggccacgaaagccgcagcataacaccatgcatggccgtgcaagcctcccctccgcaacaatccggaatcagtatgcatcggctgaagcctttcctgttttttcaagccgcccgggtatccttttccgtttgcagagggggggaacaacctgcggcaaaaaaagatcatgcagccatttccggaaaatcaatgcccttttgacagggagtaatcaaaaaaggggcaccaattatccattcggtaatctttgccctggatatgggccttaacctcatctccctgggaatccctcagacagccccgcgcccccgtccgcggaccggaaggacggtgctcattaatcgtcatcccatagcgtagacgcccttttctcgggtccttctccgtcaacagctgtatcgcattcttccccaccagccggacagacttgatggcaatatcctctccctcagcccccacaagggaaaaaccataattgccaggatcgtcaaccgtcttcgtgtccagaaccaaaggggggcagggagcataaaatgccacttccaccgtccacccctttccggacttcctaattttatggttcaggggatgcacgggtttccagtccgccccatccaacaggactttcttcatgacatagcccacatactccccataaaggcgggacatgggcgccgtcaaatggactccgtcgctatactcgaaatgatacatcggggtcgtcatcacataccggctgttcttctccaaagccatctccagctgttccagggcaatagccggataatccataggattaaactgataataattcaaatgggaaccaacctgatagccgaaacagaccacatcgtttttctgcccggtcacggccctggcgtcatgatttatgtccctgatcagcttttccattttttcccggtaccattccctcgtctttctgtcctggtgatccgtctctccctgggtccagataaacgcaggcatggaaagggtcttcccttcccggtcagccagtattttggcggccttcaaatcatccaaaatgcggttgtaggctccagttcccctgcccagggaaccaaggctcgccccacccactcccgtcgcagaacaaatcaaccagatacgggaagccgtaacgggagaataatgctgcatcaggcggaacaaacgacaggcagccccggatacgggagtttcgccgcgcggaccattcactccttcctccagaggaaccagcatcttgcggtcactgccgttctcatacgctctcacccctcccctgaacatatacaagcccccttcctcctgcttttccgttacaacgggcttagccgtccagcccacagaaagggattgaccgtaagaagttaaataattccaatccgcccactctgttttccgggaagcacagatggatgcggaagccgccgcagccatgtggaaagcaagcaaaatcaaggtaacaggaatattcatcagataattcaacggactctgtccgtgaacatacgttagccgttccctctttttatcaattcctgaacacaaagctgtccatccattgctgcagtaccattacgccaggaaatacggaattgccgttccagccgggtccacgccatgtttcggtatcatgccgtaccggcaggaaaacgcattcaatataccgacgggattttttatcctccaaaagaaaggcggcagaaatattccccgtattgcataaacaacatgaatcatttcccgtctatcaatgccatatccgcctccatctgccttctgggatgcggactcgccctgcctgttttctcccaacagccggaaaaaggaaaacccgatgccgcccacatttccaaaacaaaagctgactggtggagccagaggcacgccctgttaaagcagaccctggcggaaacaccatgccaactgctgtttatcggcgattccatcacccaccgctgggaaaccgacggcaaaaaaatatggtctcaatatttttccccctatgctcctgtcaatttcggcataggaggtgacaggacggaacatgtattgtggcgcattgacgattctgcccttaaaacgcctcattccccccaagtatgcgttatcatggtgggcaccaataacacagggcaatacaaaggcaggcagaccccgcaggaaacggcggagggtatccgggaaatagcttcccgggtccatcggctccaccccgccactgaaattattcttctgcacatctttccccgggggaaaacggcggaagaccccctgcgcatccaaaatgaaatgatcaacagggagctggacaaaacaaatatgccgagagtccatgtcgtcaacattaattccgcattcctggacaaggacggcactttcctgccgggaattaccggggacctcgtccaccttacagaaaaaggctaccgtctctgggcggacgcactactgccggaaatcaaaaaatacatgaagtaagtccgctacccccttccgcccggctcaacggccaattcggcctcatctgcgcagaagcggccagccaatcatggttgtcactcccgcacataaaaaaccggagggattattttccctccggttttcggatacggccgttaaaaccgtttaaattgtcttaatcacggaagagtcgtcatcatccctgtcctcggcagaagcggccttcctggtgggaacaggcgtcttcctgaccttttccagagccttgtccaccgccgcaatcaccttatcttccccggtcttctgactggacaactcattataaatcttttccttggcctcataatcggccttggctgccgcatcgccgggattggccttgaacttgtcctccgccttgaacaaggcctcctccgcagcctggaactttggttccaccgcgtttctctggtcttccgcagtctgcttgatgcggcccagcaggcgaatcacatacgggcggttgctgagcctcttgaatgcggaaaccagaaactggcggcgttcgctggttttggcatccgcaataagggggtcaaacaacttgagcgtggcgttgtcatcccggtcacggtgcacggagagtacgcggagaatggaatcatgggcctgggaacgcacgcgttcatgcagggattcgtctttccaggccttgaacaggtacggaacggcgtcatccgtattccagtccccccaggcggtaatgatggcaagcgcctttttggtatcctccttatagctcttttccatcatgtccagcaccttgggatcaccggtgcgggccagcagcttgtagagcattttgacgttttcctccggcatatctttctgatactggagcagtttggaggaaagcgccttgcgcttggctggaggagcttcgtcaatcaggtagcgcgccgtacggaaagcggaggaaatcaaatccggggaagcatccttcttctggaggatcttcatcacgtcgtcaaggtcgtccagcttcatggcaaaacgcatgtacttgagcaccacggcctgcttgtcctggatcttcttattcttgctttcgctgatggaagcgtacaggtctttcagcatgtcgcgcatggcggggctggaagacttggccaaaagggtcaccatcatggaatatttttccttactgtacctgccgacattttttttcatgtcttccaccacctggcgggcaatgttgtcatccatctgggccatgatggaaaccaggtgggcggcgccgggccagttttccctgttgcccttgactcccctcacattggcgagcagcagagcggcatcctccgcgtcgggaacgactttcacatccgggacacggctgagattcttggagtcaaacagacggctgcggcccagtttcccgccttccacgaccagcgcattcaggcgggcgttctcaccttccaccttttctttcttgctgttggtgctccatgcataaatccctacgccggcagcgatgacaaccaaagcgcataccccataaataacaccccgcagcagggatttggatttatccacggaagcggccatatcccgggcggattccgttccggcgggaggctgaataccgccgtcgcccgccggaggagcgccagcggcaggggaaactccctcggcggccacaggctggggaaccgcagcgggagccacggaagaagctggtgctgcccccacgggggattttaatactttcagcttgggaacggcgctttccggagcggcggccggggatttctccgccgcagcgggagccgcggccgtcttgaaaactttcaatttgggagccccccccgcaggagcaggctccggaacagacggttccggggtctgcacagccgcaggcgctacccctgcggcctgggccagagcagcggcctgagcctccgccagggctttctgggcctccgctaccttggcaagggcatcctgaatctgggcatccacggagggctcgggctgcggagcggaagcggcttcctttttctccagctccgccgcaaggcgtgctctttcctcttcggcagctacacgggcggcctccttttctgcggcaatgcgcgcggcttcggcagcctcctgctccgccttgattcttgcggcttcctgctcggcagctattctcgccgcctccttttcggcagcaatacgggcagcttcctgctcggcagccgccttttccgcagcaatcctgtccgcctccgcctgttccgctgcgcggcgggcggcttcctcctgctcctgagccagcttggcctgcaactcaggagtgagaaaacgcggcttgacaacctccacgccttccgcggcgggagaaacaaactttaccttgggtgcggccgcaggggctgccgttaccaaacggcgtcgcaatttgggaggttccggcgaagaaggggttcctgtctgatcggtcatcgtgataaaatggctgggaaattggagtgattttatacgattccgcgatcccctgcaacctcaaaataccgtctggaaaacgggcggggaacagccgccgtgcgtggttcaacaggcagattgcgaaaaaaggcttcacccgagatataacatggaaaagcgtttaaatatcccgcgtattctcccgcaaaatcataaaaaacacaatatgttaacaacaacaatcatgaataaagtaaagcgcccgtaatagaacttcaagaatacgtaccagtcatttaagaatcctcttaaaaaatgttataacacatatacttttttcttgccagaccaaggatgattagttaaataaataaccactcgtcaacatcatgaactccaacgacagtaccaaaaataagaggcgctacacgcctgaagaaaaacaatccgttcttgatttcattgctgaacggaaaacccaaaacaaaaggggtgcccagaaagaagccgccgaacgcttcggcatcagcacggtgaccatctcaagctggatgaaggcatccaaggccaagcgcggccgcaagcccggcaccaaaaatacaactgctcccaaaacacagcctctcgcagccgcccaacccgccgacctgcgccgcctggcggccgttctggaagaaatcgccgaccttgaagcccagacagccaaactcgacaccctgcgcactgaagcggaggaactcaagaacaggctgactgccaagcaggcctgattgcttttattccttccttttccggaaaaccggcttcccctgacaagggaagccggttattttctttacggagatcgcgcttgcccccccggaacaattcctttaatatccgccgtcgtgactcaacccgcccacattgctcccgcgagtcagtctgtggaaggcatgtatgccgactactttctggattacgcctcgtatgtcattctggaacgggccgtacccaagatcaatgacgggtttaaacctgtgcagcgccgtattctgcacgccatgaatcgcctggacgacgggcgttataataaagtggctaatatcgtgggagacacgatgaaattccatccgcacggcgaccgttccattgcagacgcgctggtggggctgggacaaaaagggctgcttatcgacacgcaggggaactggggcaatattctgacaggcgaccccgcagcggcttcccgctatattgaagcccgcttcacctcctttgcgcgtgacgtagtattcagccccaaagtcacggaatggcagctctcctatgacggcaggaacaaggaaccggtcagccttcccgtcaaattcccccttcttctcgctcagggagcggaaggcatcgccgtggggctttccagtaaaattcttccccacaacttcaatgagttgattgaagcctccatcgcctacttacgcggccagcccttccagcttctgccggactttccgaccggaggcgtgatggatgccaccaactaccgtgacggagaacgaggaacgggccgcgtccgcatcagggcgcgcatcctcacggaatcgaagaaacttctccgcatcacggaaatcccgttcggcgtcaccacggaaatcttaattgattccattgtctccgctgcggaaaagggaaaaattaaaatcgcccgcattgaggacaatacggcccagcatgtggacatcctggtccatctcccggccggagcggatccggagcagacgaggaaagccctgttcgccttctccgcttgtgaagtcagcatctccccgaatgcctgcgtcattgtggaggaaaaacccaggttcatgtgtgtcagcgacatcctgcgctacaatacggactccaccaaggaaatcctgcgccaggagcaggaaatccgactcaaggaactgaacgaggcgtggcaccaggcaagcctggaaaaaatattcattgaaaaccgcatctacctctccatagaagattccgaaacgtgggaagaagtgctcggcaccattgaccgggaattgcagccgtttgcatcccggctgcgcgcccccattaccagggacgacctggtaaggctgacggaaatcaaaatcaagcggatttccaaatttgacgctttcaaggcggatcagcacatccgccagcttgaagaggacatcgaacaaacgcagaagaacctcaaccagcttaccaaattcactatccgctggtttgaagccctgcgtaaaaaatacggcgccgcctatccgcggaaaacggaaatttcctccttcggctccgtaaaccgcgcgcaggtggctgttgccaatgaaacattgtatattgatgacgaaggctttgccggttacggcgtcaagaagggaaaccctgtctgcaaatgctccacgctggatgacgtgttgatcattgacaatgcaggcgtgctcaaaatcgtgcggattcaggacaaatttttcgctggtaaaaaccccctttatatttccgtcatcaaaaaaggggacgaccccgtgttcaacctgatttaccgggacggaaaagacggccccgtgtacgccaagcgtttccgcataggagggttcaccagggacaaggaatatccgcttacccgaggcgcaaagggaacgcgcatcttccacttctccgtgcatgaaacggaggaaaacagttcccagataagcgtaaacgtttatctgaaagccgttctgaaactccgtaacctgatcaggcccttccacttcgcggacctgagaatcaaaaaccgcggtgcccaaggaaatatcattaccaggcatcctgtggaacgcgtctcccgcatcatgcctccggccaagtccggaaatgaggaaacggaagggccaacaaccgctccttccgcaacagcggaacggacggaaggctcacccgccccctccgcggaaacgctgcatcctgaaacagccccacatttggaggaaccgcctgccgatccgccgctggaacagggctccctgtttgactcctgaaacgttttcaatctcttaaaatggaaatatccatgcctgactatccattttcggcttgccacaacgggccatcttctgtagatatggaccacctcattaccatgccgctttagctcagtggtagagcacccgccttgtaagcggacggtcgtcagttcaaatctgacaagcggctccatcataacccgctcaaggtcaatccttgagcgggttgcttttatgaggcgtgcgccattactcgttcccatgaatttccggcgtgccgcttttgaacattcatcatccattcatatctccggcggaatgcggcagccgcaggaagcaaagcgggacgcaacatctggcaagaggccattccacccacaggcatccccgtcaacttccggcagcgaagggccattcccggagcgggaagaaggttccgttggcgataacgccgcctcagcaagccgtttccccccttgaatacgcctccattgccatttcgaccaagggaaccatgattcaagccaatggatactacagaaaaaaagatggccgcggctatcctccggtttgaagacagccgcgttaccgggccggattccctgcgcgtttctcgccttcctgccgccgacaagggcggcaagtgggagatttgcggcatttgcgacggtattgaaccgaccgtgtttaacagattgaaggccctgctggatgccggaagacgtgaagaggcctgggaaggttgtctccagtatgtcctggataataccgccgccgtgcgttcctggctgggttccgacgcttatcctggcgttgaattcatcctgcgcgaccattttttcaattccgggagcaggaataccgggaagattttgcagcgcgcgctgaacattcacggcgccgggcttgtggtggacggcatcccgggaaaacaaacccggcagatgttgcaaaccgttctcgcccaaacgggagagtccgaatttctctccactctgaacgaacggcgcaaatcattttaccattcttgcaaacagttccccgtgttcggcaaaggatggctgaaccgcagcaatgaggcataccggttcgcacaatccctgatttagggaagttcctgcaaaaaaactcccggaaaaggagtacaggaaaatttaaccatcgttgcagcaacctgtttccatgcgccggatgccatgaaagagcctccgtgcaaacatccgcacggaagctctttcattaacaggatcaggaaaacgcttcgtcccccacaaatgctcccagcagacggcaaaaccgggaagcaggtaattttaccaatctcccgtccccccgcttgccatgctgggtcagaatccagggcagggaaagaatctcccgtttataagccagcaattcccgtacatctcccgccagaaaatggagatgccaggcatcacaccgtcccggctcaaaacggaagcggacatcgacaatctttccgaaaggtgcggcggaatccaccctgcgcgccatcaggacaagctccggagtacggatatagacatcctggaggcggccgtcttcctccatttcttccaccctccggcctgcagccagataataggaaaaggcggcagataaagcgttcatacccagttttttcttatgccgccccaaccgctggctcaccggacaatccccatcggaacggctcctgaagagccgttttttcctgaaaccgccggggcaaaagatcggacggcgcccagtcatttaccctgccggattttccggataaccggaggcatctccgttttcggctgtttctgggagtaggacaaatgccccggttccagcaccaggcaggaatcgtccctgcatatctccgcccgctctgcagtcacgtctacggtatgcccgcagccggagaggagggaggacgccgcataagccgctccggccagaaccacccacaagagacgttcccaccaggtcaatccgggtcgtgttccgcttttttcataagcgtttttcatgccctgttttcctgcctccagagccgctttcttttgttcttctgtcaaattgaagtccatttgagagagggggtgagtggtttcaggaattctcgcgcatgttgtgccgcaacggttccgcggggaaaactggcgctgcggcaggactgtttattgctattcattttgttcatttttttgttcattgcccggaaacggcctttgccggcatggaaccggcggtgacatcagaccgctcccggacacagacatccttgccctgcccttggggcgggagcaacacgcctgatacgtccgggaacaaggaatattccgccagagacaaacgccggaatttccgccgcggataacaaataccctgttgaaaacggaaccggttcatgctagtctcttccctgctatggcaaaaccggctctggggaaaggctttgacgcccttatcaatcaaaatttgtctcgtgaatccttggcggctccccaggcgggagacgttgtgcatcagctatcccatgccgccattattcccagctccctgcagccgcgcgccattttcacgccggaacaactggcggaacttgtagattccatcaaggaacacggcatcatccagcctttaatcgtccgtgaaacgcaaaacggcaaatatgaactgattgccggggaaaggcgctggagagcctccggcatcctggggctgtccaccgtgcccgccatcatccgggaagcttccgacaaggacgtgctggaattggccctgattgaaaacctccagcgggaaaacctcagcccgctggaagaagccgccggctatatgcgcctgaaaacggagttccgcatgaaacagggagacatcgccaagcgcgtaggcaaatcccgcgccgccgtagccaacagcatgcggctgctcgacctgccgcagccggttcaggacatgctgggcaatacctttatcagcgtagggcatgccaaggtacttctctccctcaaaaacaaggaccagcaaatccagctcgggcgcgacatcgtcaacaagggctacaccgtccgccagacggaaaaggccattcagaagatgctcaacccgccggatccggctcccgctaaaaagccgtcctcccctcagtacaagaaaatttccggcatcctcgccaaacaattcggtactccggtgaacatttccggccagggaagccgggggtgcattgaaatcaccttctccagcaaagcggaattcatccgcatccttgagcttctgggccaggatgaatggcctgattccaagtaaacttcctccccctttttccatgacgccccgcatcggacttctcctgttcacggccctgctgatgcagtgcgaaaaccccgtggaaacgcccgtgcccggtaaggaaaccgttcccgcgcaaatccggcaaacggattgtttcaacggaggaaacgctctgttccacgctgcgcggataacggaaatggggaaccgggcttcaggcactcccggctaccgcaggcagatggactacctgaaggaggaactggccaaatgcggctggacctgccgggaacaggattttgaaaaggaaacgccccagggccccgtccgtttcgtcaacctgagggctcgttttggcaaggctccaaatttcctggatccggttcgaggcctgctgacctgccatattgacaccaagcggggcattgacggattcaccggagccaatgacggagcatcgggagctgcggccattctggagacagcccgcattctgtccggagaccccgcacgcgccagaaatttggagcttgtgttttttgacggggaagaaagttttgcggaacatatggacagcgacgacggcctgtacggctccaggcattacgcatcctccatgcaacaaccgctccccaaatggataatcaatctggacatggtggggcggcagggtaaaaagatacgcatcccggccatgacgccccaatccatgtaccgggtttattcccgcgctatccgtgaactgggttattccccggaggaatggggagtatccggctatgccatcctggatgaccacgttcctttcatggagcgcggcgtggacacgctgaacctgattgacgacttccaggacggcaactggtggcacacctccaaggataacatcggcattctgggcgaaaaatccttccagcaaaccggggaaatgacccttcacatcctccggcaactgctgcccggcccgccctccacctgaccaggcagctctgaccctccaattatccctgtcccgccatgtccttcaactctccctggctgctgtgggctctctttgcagcctccgttcccatcatcatccacctggtcaaccggtggcggcaccgttccgtcccctgggcggccatggaattccttctccgtgcggccagggaaacacgtggaacaaaaaaactgctgcactatctgattctggcgctgcgcgtgatggctgtggcggcactggtaacggcctttgcgcggcccctgctcggaagctttttcggctgggggagctccggattgaatgaagtcctgctggttctggatcgttccgcttccatggatgcccggccggacaaaaccagctccctccgggatgccatccccccgctggtggaatccacgttcgcgcagctcggccactgccgcctgtccctgcttgattccgccaccggaaccgtgacccagattcccgctccggaagccctggcggatctgactgtaagcaagacaacggatggaggcgcggatattccggcacttctgcaaaaagccatcccgtacctggaagaatccggcgcaggaaagacggaaatctggattgcctcggacatgcaggcctcttcctggaagccagactcccctctctggcccggtgtgcgccagaggctggccgcccttcccctgcccccttccatccgcatcatggccctccgcgacaggccggaaagcaaccgcggcatcagagtccggcaggctcaggtaaataacgggaaactggtgctggacctggaagtgctgcggcagggtttcaaccccaaccagccggaggacgtgccggtgcagctttccgtggataacgcctcatcctccgccacgctgcaactggcaggggaaaacacctccatccggaaagaaatacccctgccgcagggcaaagaatccggcttcggcttcgttgcgctgcctcatgacgacttcatcagggatgacatttccttcttcaccttcgcccccaagcctctcgccaacatcctgattttcggtccttcgggagaagtggggaaaaccctttccctgatgtccgcccctcccggcctgcccggcaggaaagccacgatgcccggcaatacgcgggaagctcaggctaatctggcctcccagtccatggtcgtctggtacgggccgccgccgcgcgcggaaatgggaaaaaaactccagacattcattgaagaaggaggaatagcccttttcctgcctgacgacacggaacacggaacacggcattcattcctgggcgtttcctggggcgcgacggagacggctccgtccgaacaatactaccgtctggaaacgtgggaccggcaaaggggattcctccgcgacggttccgatcagacacccatccccgccaaccgtctccgcgccgtgcgtagaaaacccctgctgggcaaataccgcactctggcctcctgggatgacggttcctgcgctctggcccaggtcagggccggaacggggtccgctctgttcctgggaacgctgcccagatattcctggtccaacctggcggacggccacctgctgctccccctgctccagcgcatggcggaccggggggcggaacgcttttccacctccatttccctacgggtgaatgacgcctccctgccgcaatccgccacggacacccccgtgcgcctggataatgcccagggaagccacccctccggttctccggccgatacggcgggcgtgtaccgactgggagcacagacctacgccgtgaaccgcccctggccggaagacatgcctgaccagattacggatgaaaaactacacctccttctgccggaagcttccatcagttccatgcagagtgcagaggaagccccctccctggtgcaggaagcatggaagctcttcctgttcttcgtcctcgcctgcctgctgatggaagccctcctgtgcctgcccggccagacggccaaacgcccctcccccaccacccgtccatgaacctgagccttcaacctactgcgtcaagcgtcatcctgaccgccctggttatggcggccggcatctggatgagctatatctcctgcaagcgcaaccgccggccgctgacattcaaactggaaattcttcgcctggcaatccttggcttcatttgcttcctgctcttccaaccggaatggatcatcacctccgccccgcaggaaaaacccaaggtttccattctggaggaccgctccggctccatggaaacgcaggatgttgaaatctccccccagcatgtcgtcacacgcacggcctacgtgcaggaactgctcaagggcaacagtacggaatcccttaaagacacgcatgtagtggaatacgcctccttcggcgcgccacctgcgccggactctccggattatgccatggccggcacagacctggccaagccgctggaggacgccatgcaatcctccgacaacctccgggcggtcatcatgttcacggacggcagccacaacgcctcatcctccgtgctgacgcaggcccagcgcatgcgcaccaggggcatccccctgttcatcatttccgcaggcagcccgtatcccctcccggacctggcccttcaggacgtgaaagcccccacttacggcatcatcggggaaacggtgcaaataccctttaccattaaaagcacgctgggcaaagaaacgcgcaccacgctcatcatgacttccagggatacaggaaaaaccgtcacccgcacggtcaccattccggcccagggggaggtatccgacgcggttctgtggaaaatagaacaagaaggggcggaaacgctggaactcaaactcccggttcagccccaggaacggatgcacaataataacgcctcttccttcagcatctccggcaggagggaatccatcaaagcactggtcatcgataccctgccgcgctgggaataccgcttcatccggaacgccctgtaccgggatcccggcgtggacgtgcataccctgctctttcatccggaactggaagaaatgggggaaggccccgggtacctggtcaaattcccggacaggatggaagacctggcccggtatgacgtcatcttcatcggagacgtggggctgggctccaaagggctgacggaagaacaggcctccctgctcaaaggcatggtaaaaaaccaggccagcggcatcgtcttcctccccggctaccagggcaggcaaatggaactcctgaaatcggaactgggggacctgatgcccgttacattcctcaacaccaagccggaggggacaacccagccttccccatccccccttatcctgacgccggaaggccgcggctccctgcttaccatgctggcggatacggagggtgaaaacgaagaagtatggcgcaatctgccgggcttcaactggtacgcccccgtggaacggcccaaagcgggaagcactgtcctggccgtgcatgcggcggataagaatgcctatggccgcattcctcttattgtcaaccagtcctgcggcaacggaaaagtcctcttcatgggaacggattccgcctggcgatggaggcgaggagtagaagacaaataccattaccgtttctggagccaggtggcccgctggatgagttaccagcgcaacatggccgcaggggaaagaatccgtctgattcccaccccggaacggccccggccgggagacacgctgaccgtcaccgccatggtctccgacaaactgggggcccctctccagaatggagaggtttttctggacattacaactccggaaggaagctccagccgcgttcaaatggacactatgaaccatacatggggctcctttaccgcctccgtcaaaatcaaccgtcccggcacctggaagctcacagcttcatcctctgcggaaccggataaatccgttacgcttcccgtcatcaccatgagtgaaacgctggaaaaaataggcagccccgtcaataccgcgctaatggaggaaatggcctccatcacacgcgggcgcatggtaaaagctgaggaaatacagcggctcattaaggaaatcagggatctcccggtgccgccgcccatggaaacgcgcatcctgctctggtgcaacccgtatacgctctccatcctcatccttctgcttaccctgttctggatagggagaaaactcaacggcaccatttgagacgcaggtttcccacacctccccggcaggagtttttcttccctcccttcccgttattttcctgcagactccctgtccgcggcagcagaagccggctgagaaaatctcagcctcaatcccatttttttccaggctgcggccatttccccctgtacatcctccggagtcttcccatccagcaaaacagcacgcgccttcccgccgccctccgcatcacgaaccctcaaatagcttctgaggcgctccgcctttccgctcccttccaggtggctccagtaaaccatccacaacaaatcggcccaatactgaagcgttcctcccctggaggaaacgccatgctccgcggcggaatgtgctgaatccctggacagcatgtccgccagggccggcagagcttctctgcccgtgcggacggcgcgcggaaccatcgcggccagcctttccggaatcttccggaataccggagcttccttctccatgggaagaaaagccatgtacgcggaaaagccgtccaccagccagtgatcccaatccatggactgcgccgcccagtgcgtgacggcaaagcgcggatccagtcccggcttcagcagctttcccttcttatcccgtaacagcagagccgtgaaactggtaggggaaaacttgagatgcccgttccgcaggcccggagccctgttgaaatcctcttcctggaaacataccctcaccagatacttgcgggaaggccggcgggccaccgccagattcaacggaacagctgccagggcagacagaatggtttcaaaacgccgggcaaggatcatacgctccgcttccggcagctttccgggagactccatgatgaaatgatccgtttcatacacactcagctcctccgtctcctgcacggttttcaccagcaggaaaccgggaacaaccaccctctccggccagggagcatcccaattcggctccaggggaacgtaccgtctgccgaaatccccctgcacaggaggattctcagcccccacatccgtatcagggagcgtcccgccagactttacccattccagaatatattcctggtcggctccggaaaaaatattcttgggaacagccaccacgcgaccatcctgaagcttcaaatccacctccgcatcacggacggccaccagcacggctacgacggtagcgccccggtcattcgtccaaatgcgcgcccgggcgcttcccgccaggctcagccctgccaatacggacagaatctttacaggtaaggtcatagggttccctttgcccgcacaagctaccacattgtcccgcagacgcaaccctttttccgtctcccgttcttccggaacaggttccttgaaaagaatatggggaaggaatgcatcatcgcctgtcccccggaggggttgacacgctccggcaaaacccataatcttatggaagaaaggaaaagaaggcatgcatatcagtcccctcagaaaaaatattccgctgactgtcgtcaccctggcggccttgggcatcatgttcttcctgtttttcatgcatcccgcccctccggaagaatcattggaattctatgcgccggacggcaatatcgcgggttccttccgggtggaaatcacgaatgcgccttccaaccccgcctacacggaagtaaaaatcattccggaagacatggaatccttccagcggtttttggcccagttccgcaacaaacccgttactgcaaaaattccctcccacggcagccacatcattgttccgggccgggacatgcaatacgacggagtcctgcgcctgaccggacattgagagggcaggcaaacagaggccatcttaaagttgttctccctttcccacgtccttcgcccacttccgggccaggaaggaacaaaccatcaactggagctggtggaacaccatgatgggaatcaccagcagcccgatgggggctccggcaaaaatcacgttcatcatcggaatgccggtagccaggctctttttggagccgcagaaaataatcgcaatgcggtccttgcgggaaaaacgaagcctgcgtgaaaggaaagccgtcagccacagggccgcggccagcaggaggccgcaaaaagccagcacctccaccagggaaagccagggcagatttttccatacgccgttaatcatcgcatggctgaatgccgtgtaaataaccagccagatggtgctgtggtctgtccaggaagtgagattccggtgcgtgactacccatttgccaatccagcgctgggcgaactggccggccacaaaaggcaccagaataatatagcagatgttcaggaaagtggaaaaatccacgcccccttcccctccgcgggaccacaccagccccaccagcaagggggtgaggaacacccccagcaggctggaaacggaagcggagcaaatggccgcggccacattgccgcccgccatggaagtgaacgctatgctggactgcacggtggaaggcagcatgcacacatacagcattcccatgcacaaatccggccccagcacactattccacaagggcatgctgaatatacccagcagggggaaaataacaaaggtgctcgcagccaccagcccctgaaggcgccagtgcatcaacccttcccatacggaacggcgggaaagcttggccccgtacaggaaaaaaagcaaaacgatggctgcatcgctcaggcggctgaacactgtatcccatactccggaacagggaaccagaattcccgcgcccacactgacgatgaggccgatggtgaagcgatccaatttggcaaggaatcccggcatggagaaggaaaaaaggtaaatgccgcctccggcgttctatttgaaacgcacagcatgcttcttgctcaggcgcaggatgctgcccggagccagttccaaaacggcggaggggtctgtcattttcacatcattcaactggatggcgccgggcgtgaaatgctccttgcggagaacgccattggattttttcacctggaaaacattctcaaacaggaaggaaaccagggccagggcattcatgtcggcaggcagggaggcaatctccacttccggcaaatccgcggcagccaaatccctcttggaaaaacgggtttcccagtcagaacgcgcggcatccgcagcggcggaatcatgatagcgtgccgtgattttccaggccaggagctttttggcttccatcggatgcaatcccatgtccctcttctcacccagcagcaccaggtaatagcggtccatcagttcgtcgctggcgctcatcatcttgccgaacatcatctccggagcctcatccacgcccacgtaattcccgtaggacttggacatcttccgcacgccgtccagaccttccagaagaggcatcgtcatggcgatctgcggcagcatgccttcctccttctgaaggtcgcggcccaccaggatgttgaaaagctgatccgtcccgcccagttccacgtccgcacggatttccacggaatcccagccctgcataatcggatactgcatctcatgcaggcgcacctccttaccgccctccacacgggccttgaaatcctcccgggccagcatctgctgcatggtcacgcgggaattaagcttcagcacctcctcatacgtcatcttgcggaaccagtccccattatacacgatctccgtcttgtcacggtccagaatcttgaacgcctgcttggtatatgtctccgcattctccagcacctgttcacgggaaaggggggggcgggtcacggaacggccggaagggtcgccgatcgtggcggtgaaatccccgatgagcaaaacagcctggtggccaagttcctggaactggcgcaatttctcaatagccacggtatggcccaggtggatgtccggcgcagtagggtccacgcccagcttcacgcgcagggggcggcccagcttgaggcgctccttcagctcttcgcggctgatcacgacggcggtaccgcccatcaatatgtctaattgctcatctatagtcattgatctggcgcatagagtgccgggggcaccgcgccttttcaagcctatatcctgtgcacggctcatcgaacgcagccaagagtcccccgccaccggtcccgacgtgagggaacaggcacgaaatccatcccgaaaggcggaataaacggcacgccggtgctggcattttccccgcatggcccttcctcccgttccatgtcacggaccagccctgctcccttccggatgcagagaaacgtccccgcaaatctacagaagctggtacaggcggggataggaagcatgattggcggttatgtaatgcgggcgcggcttgggaatcggctttgtccgcctttgatcccagccgtcacggtcatgatgatcattatcatggcgcggcggcccagaacggtaataatcacgatcgtggtggcgatgatggcagcctgcggccaaaacgattgaggctgctgcggcaaaaacaggaattatgttcatcttcatctttcttcagggtaagacagtccggcgggaggaatgcgaacggaaaaagtctgtcacccgaacaaacgctccctgttgacgaagaaaacggctcccaatacacataaaaacgcccacaggtaatcccacttccatttttctccgatgtagaacagggcgaaaggaataaacacgcacagggtaatcacctcctgaataatcttgagctgggccacgttaagcccgcccgcactgcccaggcggttggcgggaatcatgaagcaatattcaaaaaacgccaatccccagctcatcaggataattaccagcaggggcttgccatccgccccggaccccttcttcagatggccgtaccacgcccacgtcataaaaacgttggagaccaccagcatggaaatcgttaacgcaatcttcatgatttttatttaaaaacatcagtccttggaggacttgggatccagggcgtcccgcaggccgtcccccaggaaattcagcgccagcagggtagccgaaaacaggagcgccgggaacaaaagcaattccggacttacctccatgcggtccgccccttccttgatcagcgttccccatgaggaattgggagccttcacgcccagccccagaaaggacaggacggcttccagcagcatgatgccgggaacggccagcgtcgtgtacacgatgacggccccgaacaaattcggagcaatatggcggaacagaatcttcatgtggccgatgcccagggaacgggcagcttccacaaactcctgccctttcagctccatcgtctgcgtccggacaatacgcgccagcgtcagccagcccaaagcgccgatggcgatgaacaggggaatcagcccggtcatggggctcaccatttccacagaccagcccgtcatgccggaaacccactgcgtcagcctccgggccggctcctccacggacaaggaaaaaataatcaccagcacaatgaacggcagggcaaaaagcacatccaccaggcgcatcatcagggcatctagcctgcctccggcataaccggaaaccagtccgtacgccacgccaatcaccagggaaacgcccgtagcgaccactcccaccagcagggaaatgcggccgccgtacaggacacgcgccagcaggtccctcccaagctggtccgtgccgaaccaatggtcccaggaagggctttccgcaatccgggacaaatcctgcacattaggatgaggcagccacggcagcaggggacccagaaaacaggccgccgcaatcagcgccaacgccagcagggaaaacatggccgcccggttgcgggaaagacgcagaaaagcgtccttccacagggaggaaccctgttcctccatcctgttccatcctctttttctcatgattcctttctcaatctcgggttgacggccatttgcaccagatccacacccaggttggccgcgacgatcagaatgccgtaaaacaggacaagcccctggatgaggaaataatcccgatccgtggttgcgttcacgaaatgctgccccatgccgggaacctggaaacaggtctccaccacaaaagaaccggtaatcatggcggcaaaagctggccccagataggaaagagccggaatcaggccgcctcgcaaagcgtgcttccaaaccgtacggaaaggccccgcccccttggctcgagccgtccggatgaaatcctgccccagcacttcaatcatgccgccgcgcgtcaggcgcgccagatatgcggcattcaccagccccagcgtcagcgccggaagcaccacacaaccgggagaatcccatccggccacgctcaagccgggcacatgcatgcccagcgccacgccaagcagcggagccacgacgaaagcgggaatgcaaatgccggccatggaaacgagcatcacccaccagtccatccaccggttcttgtacagtgccgccacaattccggcgggaatccccgccagaatggaaatagccatgcctatgactccaagctggagggaaacagggaatgactggccgatcatatccgccacgctgacgccttccttcactaaagacggccccaggtcgccatgaaccagcatgttccaccagtaacgcccgtactggaccaggggagcctgatccagcccgtaactggcctggagctgctggaggacatgctccggaagtttcttttcccccatgaaggggtgccccggcaacaggcgtatcaggaaaaacgtcacagtttccagcaccagcaggaccagaagcccctgccccaggcgtttcagaatcatcctggtcaaggcgcggcctccttcccatgttcccgggcgtcgtccaggttgatatcctcaaacaaatggttatccagcagcagggggtgccatccccgcacctccggcctcttcaaataggaccgtttggcccaatacaggggaatcaccggggattcggaaagcatcagcgcttccgcacgggccagcagggccatgcgcttctcctggtctcccgtggcgcggctctccgccagcaggcgttcatactccggatgaaaccagcccgtattattgttcccggaggcggaaccccacaaatccagaaaactggaagggtccagataatcaccggaccatgaggaggaactaaaatcatactgcatggaattctgcgcgaacttgtaggccgtccactcacaggaacggatatccacatgaatccccagatgctttttccacatgccctggatggcttcagccatcgtcttctgaacttcgcgggatgtagtcatcagctccagccggggaaaacccttcccgccgggaaaaccggcctgggccagcagggaacgcgctttctccggattgaactccaccccatgcggcgtcttgtatccggcgccgtccggcgtaaagccgaagcacggctggccgccgccgcacaccacatcccgcaccagggcctcccggtctaccgccagggaaagggcccgcctgacccgggcgtcattcagcggcgcacgcgacgtattcagacggtaaaaaatagtcacgtaataatcatcctggcaaaaatcatcgccgccgcgctcccgggcgtaagccgtcatctcgggaggcacgttgttggtgacatgaagcttgccgttgaaaaacatgcgggtttccgtaaagccgttcacggtgggaagaaaacggactccattcagccggacggcggaagcgttccggtaccggggattgcggcgcacctccacataatcattgaaacggtgctccgccataagaaaaggtccgttccctacggccgctccaggccgcgtccatttccccgtcctgtccagcatgccgccgtgggcttccacggcatggcggggaaccggaaaccaggtgcagtgaagcaacagcaggggaagctggggcatcggagaacgtagctccatctccagggtataatcatctgcggcgcgcacgcccacgcgggcttcctcccataaatccggctttccggcccggacatcctccaacatccgggccgcaatcttccgcgctccttcctccggcatcccgtccggccactccatcagggtaggatcatcccgcagagcctccagctcagcggctcccataccatccagcctctcccaatccacccgggccagaaccctctcttccagcccctcttccccagccagccgggaaccgggaccgcacagtagcaggctgcgcctgttccggttataggcttccgcattcttcagcggataaagcatgtctgcgtacctccctccaaaccctggatgaagcaggcggtgataggcatacacgaagtcatgggccgtcacaggaacgccgtcgctccacacgacgtccttccggagggaaaaacgccacttgtccgcctccggactgtgcgtccacgactccgccacagcgggatgaaaaacggcgtcatccctggaatccccgcgcagcagcccctccatgacggcattgatcatcttgaaatcggaaacggaagtggcgatgtgggggtcaaagctctggggctccgcattattgcccacgatgagcacccctgcctcctgagcccgttccacgctcgagcgcgtatcgcatccggcgagcaaaagcatcacacagaacatcatgaacaggcgcatggcgggattttgtcaggtttccttcccgtgcgcaaggcttcacgtcaagaaaccggcatcaaatcctgcctttcgccactcccgcagcagaacgcgccgaaaacacgccccgcagtagaacagcgcccttcataagccacagtgcctcctttccatcatcccttttgagtaaccggagaaacagggggaaagcaaaaccccgcaacggcagaaaaccgttgcggggctgttttcccaaatcaagggaaaagaaaagctgttttaattatttgccctgcgcctttttggcagcgtcaatctgggccttgatcttatccttgttggcaagaatgccggccttgatgcggggggcctgcattccggcttccgttcccggcttcaactcggccaccttatccagaatcagaacggcgccgtccacgtcaccggtggaattcaggtaggtcccgaactccatcatcagcaactcctgctgtgtttccggcagaagcttgtcgcggtcgggatatgccttaaccacctgaagggcttccgcaggcgtagtcttgtccgtcagcttgccggcaagataattttgaacatctttccgttcctttttaagctggtcggagagggcgtctgcagctttcaggccggacttgtcatccttgtccagcttcttgatttccgctttcacgtcaccataaaaattgtccacatattcctgaggagccagcttgagcacttccatcagagcggcaactttcgcttcatccgtagcagccttggcgacattcgcttccgcggcattaagagcttccttgttcttcagggcatcctgcatggctttcatgacatcatccccggagcgccctccaacaaatcccccaaaaggcttgccggaagcgtccgcaaacacaacggtcgggaatccccgcacgccgtattgctgggcaagcttttcattggcggctttcatttccttggactgttccttgccgcgcggataatccagctccaccagcacgaaatttttctgcgcttccttctggaagtcaggcttgctgaatacgttggcgcggagctgcatgcaaggagggcaccagtcggaaccggtgaactcaatcattaaatcctttttctgttcggcggcctgttttttggcggcatccatatcggtaatccacccttccgcggcaaagcagggagcgacgcaggcggcaacaacaattggcagaatttgtttaatcatatctacaattcaatattgtagaatcggacagcccgcgtcaatcccctgttcaatcatttttagaaaatctccaaaagggtgcgtcttccgcagggaagtccgcatacggccgatgccggaaaaactgatgccccatgggaagacggtgtcattattgaagcaaatcgggagttgcctttcagcctgttttcacttatgtacagaacctatcatgaacacggttttaatcattggagcaggcggcgttgggcatgtggtagccaacaaatgcgcccagctgccggatatttttcaaaacattcatctggcctcccgcacgaagagcaaatgcgatgctgttgcggaggacgtacgctccagaacgggcgtcagcatcactacccattccgtagatgcggacgacgtgcccgccaccgtagccctcatccgggaaatcaagccgcagctgctgatcaacgtagccctgccctaccaggatctcaccctgatggaagcctgcctggaaaccggagtcaactacctggataccgccaactatgaaccccgtgacgtagccaaattcgaatactcctggcaatgggcgtaccaggagcaattccgcaaagccgggatttttgccctgctgggttccggctttgacccaggcgtcaccaatgtattcacggcatgggctctcaagcatcactttgacgaaatccatacgctggacatcattgacgtcaatggcggcaatcatggcaaggccttcgccaccaatttcaacccggaaatcaacatccgggaagtaacggcgccctgccgccactgggaagacggagccttccgggaaaccgctcccatgagcatgcaccaaagtttcacctgcccgcaggaagtgggcacctatgaaatctaccgcatgtaccatgaagaaatggaaagcctggtcaagcacatccccaccatccgccgggctcaattctggatgtccttctcaccgaactacctcaagcacctggaagtgcttcagaacgtgggtatgacccgcattgacccggtcatgtacaacggagttgaaatcatcccgctgcaattcctcaaggccgttctgccggaccccggggacctgggcaagacgaccaggggaaaaacctgcatcggcaacgtcatcaccggaatcaaggacggccaattcaaggctgtgtacatttacaacatttgcgaccatgaacaatgctttaaagaagtaggttcccaggccatttcctataccacaggggttccggccatgattggcgcggaaatgatccttacgggcaaatggactggcgcaggagtcttcaatatggaacaaaatgatccggatcccttcatggacgagctcaacaggcgcggcctaccctggcactgcgtggaactcacggaagaacaggccaaaaccctgaaggtcaaccagcaataaatttcagcaagcgctgtcggcatcatcaaagccggacattgaatttccaatgtccggcttttccgttttcagcggggaacagaattccccaggacagcacgtcaacgcctgcctccgggaaaaagaaaaagccccggacggcttctttccgcctcagtcataattttctggcgggaagagcaggcaggttgtaaaaactcagtgccatgaaatatcttgcgttatttctcatgttcctgcttcagccggcactggcggaagatacagccccatggaaaatagcgatcatcggcgatacgcacgactcccccaagcgtatggaaggaagcgagggagtagcagtcaacttcatcaaaaccctctatggggaaatcctgaaacacaatgtggacatggtcgtccaggtaggggacatggcggatattgaaggaagcgcccccgtcaagggactcgccaaacgcaaggaactcaacaaaattctgagagaaaaaggcatccccttttatgccgtgcgcggcaatcacgaatcccttcctttccgggcggaacaattccgggaactcttcctgcctacgcggaagcagggcgccaaagggctggctaccagaaagttgaactacggcatccgccataaaaacgcttccctgtatttcatggatattgacctcacccctgaccagctcgtggactttagtgcgtgggtcaaacgcaacagaagcaaggccaacacagttccgaggcactgcctggtcttcacccaccgcaccctgcaaacgcccatgcaattccgggaatgcctgtgggggcgttacaacgacagcgcggcggaacagcaaaacatcttttaccgcaacctccgggatgccggagtgcgcttcgtcgtcaccggacacctgcacgcccatgacctgtatatgattacctccccggacggacaaaacacccttacctccctgatctgcgcccctgcggggaacaaggttcttcccatcccttttctgctgcctgcaaaatcccgggtaaaaaccctgcaataccgctccggcattacggcctactatatcctgaccatttacccggattccatgaccctggatacctacgccgcccccaataacggcattactgacgaaggcccccaaagcggagagttcaacaaattgaactcctacgcaattccgatggattagaacatactgcggcccccgtttcttccataacgcagcatcccggaatctgcctgctcccgtccgctatgcacccctggcgtccctggcgaaacaatggaattttccgggaggttcccaatcccccatgttatttcatatgcccggagccacgggactttatctttctatcgtgctggcgcccccggtcgcccttatataaaaactccgttcttccatcgcggcctacagtacggtcaatcaggtctccgatttcctggtcagcgtacccggccttcttaagatacttaaccacttcaccagcctgccccggataaaaacggaccagcatctccacaaactcaggttccaatctcttttccaaatgatacttacagttgttatttctgtcttcattagacagcagcttattgttgtaataaattgatcggggatcagccccgcaaaataaactcagttttcgttcctgaaccagtctcaaggttctttcggcactcattttatcgtattcctccttcatcctggcctgtttctgctttaattccggctcatactgagtcctgaatgttttcaatacggccgctccatattctgcccagattctgcacagctcctttctctttacgccgcatcgggaaacgattccggatatatcccaggataaaacgctcatccattccacaaccctagccttcagcttataatccatgttatcatataagccgtccttcggagtattctcatcataattcagaggaaatacgtccattgaagagacagcgtaaaaaatccaggacaacaccctgacgtcttctgcgttcacatctccagctcccttggaactaaaggcgccaagtttcttccgcgcctcccggtaacaatccggcagctctttttcatgcaacagggaaagaaactccttcttttcctgaggagacgttttgaatgcggagatgctgtcgggcaacggaagccggagctgggcaggctttccttcagcagtatttcccaaatatatatcagcggaatatgcctctgtttccgtttcaatcctcaacgcgccgaaatcctcttcctccacgtccgcaaaggaaaaaccgcacagggaaacagcacaacctattaaaaggattcttatatttttaacaacaaccgccatcagacgcagatgataccttattgccatttcccattattccatagcaaaaaattctaacattccgcagctttttcctgctaaaagattctgatgctcttcacgccataatacatcgccgcgcctctgttgacgtagtcttccgggttttgcgacaggtctacccagaaaatgaaagaacaccagggggagggaggagagaggggaggaacaacgatttcctgaataccggcctttttctgctccagaaccaggcggacgcgcttttcatgctgccggaacagaagcagatgatcatgaagggttgaaaaaacgcatattccggacaacaccagaaaaacggccacagttatctgcggacggggcacggcactggggatgccgtaccacatacgaagaagaaccagcacgccgacgccgaacagcagggtggcggagaacatggcatgatccgccggaatgacggcggcggcgaaagaaagagccatggcataagacgccagaatatatgccgccgctattccaagggaaattttccatgcccggaaagagttccggtccttgcgaaaacttttccagagaacccaggcagccgccacgcccagtaacaccggaagagccaggtattcatgcatccggaacaggagcgaagggagagcttcccatctgctccaaaaaccggaaaggggttccgcgcagccgggagtggcggaatgcatccgcgcggaaatgccgggcgcaagcagcatgcacagggaacctgccacctggaacacaaggcccgcataaaaccacaaaggaagtttttccttccgcaccaggcggacaaaaacaaacaaggctcccagcaaaagccaggttcccggaatattgttttcattggtcatgcctgccggaaatcccagaacagccgcagcggcaaactttccccagccactgtttcttccggaatctccctttctcccggattccgcgtcgtccagcaaaccgcggtacagacacagaaagcccagccagacggcggcgccccaggaatagttggtggcgccggagagccagtaaatcgtgacgccgggcctggccgtgcacgtgaacagcaggagaagccccaatccgaacagacgcacgtccggccaggaacggggatccaccctgcgcccggaagccagataaaacatcatcagcgcaagaccgacctgtacaaaggggttgagcagcatgaagagccattttcccgccgtcgctacggcaaaggccaggtattccccgattctgggattccaggtcatgtaggaggctacgcaacgctcccagaccaggctgaaagagaagcagtgctccatgcccgtcagggcatgatggtacgcatcggaagtgagaggactccaccagctgagcagcgccgtatacaataaggcggctgcggtcagcgcccaaaaccacaccctggacgtgcggggggacatcatcagctcggatccggtttccttttccgcagtgcgggaggcagatccaggtcttccccatccagaatgagggggcgcacacgggcaaaaaggccgtggcccgcacgctcttcctctccttcctccggaggcaagccttcctccagctccttgatgtcaggcatcgggactgactccaattccggctccgcctccgtttcggaaatttgcgcaacagacgcggactcccggagcgtctcctcttcatccggaatcccgggaacaggccttacgggcaccagttcctcttccaattcacgttcatccctcctggggacgggaacaggggcggaaggatccggccccggatgccgttccggttcgtcaaccggggcaggaggtgcaggctgaataatggttttcccctctccgaggaaagatttttcctccggtacaagcactgtctgcgacgccacttcccgctgaagcacaacagacggggaaacagatgtctctaccacaggcacggcgcccagcacggtcagggacaggcggtcttccgtctgctgctccacggaagcgccgatgtgaaggcgcacccccttccccaggatttccgccaccccgtccaccagggcttccaggcgttgcagtgtcagggaagctccgccgcgcaccagaaccaggacatcatctacttcccccaaacgtttttccagaaagagaggggaatgccggacctgatccaatatgtccgccacggaaacatccgcagacgcttcacccacgccaaaggagcaaattccttttcccgttccggctacgctgagcaggtcgtccaatcccacccggagcaggtttccggaagaattcaacagagacggcacaataagcacggcacgggctataagggcgttaactacggaaaaggcttccagcactcccctgtcggggtctatgagaccttccatggcgtcattgtcaaaccgcagcaccatgtcggaatacagggcaaggcgggacagcgcttcatccgcctggacagcgcgccgttccccttcaaacctgaagggacggatgacaacgctgacgacataagccccctgttccttggccagacgggccgcttccggagccacgccggaccctgttcccccgcccagcccggcgacaagaacagccagggcgctgccttccagagcacggagaatggaagactcgctttcacaggccgcctgggctcctacggaggcgtctccgccggagccgagccctctggtaagcctggcgcccagatggaccttgcacggaacggctgaagcgttcaagagccgggcatcaagattcatggcacaaacggaagctggctgaggggacagcaacaacacttcttccattaccttggtgcctgcggcccctatgccgcacaggcagatttttccgggcaggccggacggcccctggggagaaatttccagcatggttgttaatttggataaaggttgatcaggagttcttctttccgaagaaacccagcatccggcccagccagctgcgctgttgcggcagctcggcatccagaatctgggcataccgtatcaggcctatggccgtgcagtagcgcggatcgtccaggtaggaaggcgctccgtttttgaccagcgtaggccggctgatggccacgccgaacacgtgggaggccagttcccccacaccgcgcatcaggctggcgcccccgcacaggtacacgccgtggcagcggttgcccttgaaagtatccttgggcagggaggatttgaccagattgaagatttccaacagacgggaacggatgatttcattcagcacgttgcgttcgatggcggcatccttcatatgcccctctccacgcacgcgcaccatctcgttggttttcccggagaagctgttggcgtccccttccgttttcttgagcaactccgcctgggccagcggaatgccggtcatcagcgtgatgtcattggaaatgtggtcgccgcccagcggcacgcatccggaggccacaagctggccgtccaggtaaagcacatagtccgtcgtgcccgctcccatgtcaataagcagagcgcccgcctgcttgacctgcctgttgagcacaaactgggccgtggcaatgggggcaaaaaccacatccgcaatatccagagggacttcccgcacgcaacggaaggagttggtgatgcgggatttgattccgtggatgatatggcagtcgatgtccagggttcttccggtcaatccggcgggattggtcaggttctcctgcccgtccacggaaaagaggccgggcacgcggtgcaggacgaattgttccggccccagggcaacgtcccgggcaatttccgtcacctcgtccatatgctcctgggaaataatgctttcgtccggggggagacggaacgtcccccggttgttctgccccacaatatgggctcccgtcacggacagatagacggtcatgatatccacgtccgcatggtcctgggccatgttccacgcatcgtaaatgcactggatgaccttggaagtgtcttcaatctctcctcgaaccacgccctcgctaggaacctcacccacgccgatgattgtcacggtcgcatctggcttcacttcgcctacgaccatgcaagtcttgcttgtccctatctcaagccctacgtgaatttttgtcttagccatgaaaatcaaggaactatcaacgtcctcgcacctgatagcacattactttccattattcaagaaagcctgcgcgaacatacgcagaaaacgcggttttcctccgcgcagccccggttcaaaggcctgtaggatggcgcaccaggaagtttctggtattgcggccgtccactctccagcggggaccttcgccgcggcgcccgcttcccgtggtgtcaaaccggaggccgcagatgaccatgaagacgtgtccatttttggcataaatggaaatccagtccccggcgcctttctgcccgtaattcaggaaaagcctggaatggcgggtggacgtgagcaaaccggcttccttcagcacaaaggaagtgctgccggaacagtcataatgagtatcataatgcctcctgtgccccccgcccagccggtacggcttgttgaccagggaattggctgctgcaatggcgcgcttgacctgcgaaggggcatttctggggggaatggctttcccgttgtgcagcacggccgtcttgccgggcacaaagtggtaggcgggaagacgcgcaggagcttcaacttgttgctgggaggaacaggaagagagaaaaaggccggccaaaagggcaccagccacggagagagttctgtgggccgcaaatgtcataagaattataaactgcggaattcccgcccccttggcaagaaaataaatttcccccgtccacattacatggtagacgggggaaagaaatcagcaatatttagccctaggaacggctgtgggcatccttttccacagccgcccacagggaatccagggaggcctggacctccgtcaatgcttccttcacaggggcgcccggtttcccgtgcccgaagaggtagtatttaatcttgggttccgttccggaggggcgcaccgcaaaactgcggccgtccgccagatccacaaaaatcattttttccgccggaatgggatcgccttccgcgtccaccaggtcgcctctggaaaaatcccggatgccgctgatggctacgccgtccacttccgtgggaggattggaggaataggaggcggcaagggcggcgattctggccgcgccgtctgcgccttccatcaccagtgatttgcccatttccaaatacacaccgaactgctcaaagagttcatgcagcagttccagaaggctcttgccgatgctttccgcataagcggccaattccgcaaaaatgatggcggcggagttggcgtccttgtcccgcacaaagtcctgggccaggtagccgtagctttcctccccgccgaagacaaagtaacggctgtattccaggcgcagggcacgcgtttgttcctcgctcatcctgcggtagccttcccgtttttccgccggaatggcctgttcatatttaccgagtttctgggcaatatacttgaaccccgtgagcacgttgaccacttcataaccgaagtgatggccgatggcatcctgaagccccgtcgttacaaaggttttcaccatcacggcacgggaacggttggagtcattgatgatgccaagctcggacatgctcatgcagcggtaccacgccagcagggagccgatctggttgccggtcagcaggtgcattttgccgtcttccccgcgcacagccacccccatgcggtccgcatccgggtccgtggcgatgacgatatccgccccagaagcatccgcctgttcaatggccagggccagagccggcggattttccgggttgggggaagcaaccgtcgggaaacggccgtcctgcacatcctgcgccgccacggtctgcacgttgcagcccagttccttcaacaggggcacgatgatatggccgcccgtcccgtggaggttggaataaacgatcttagcccctcccctgttgaaaagctccggacggagcagcacggttttcaagcgatccatgtaaatacggtcaaaggaggaatccagcacatgaagggttccgcgccggtcttccggcaacggttcatattcttcggaagtcagggaattgacctccttgatcacggccttgtcatgcggaggcacaagctgggccccatcattgaaataagccttgaaaccgttgtcatgggaggggttgtggctggcggtcagcaccacgccggaatccgcatggagttcccggatagcaaaggagatttcaggagtggcgcgaggactgtcgaacaagtaaatgtcacaacccaggtccgtgccgatttttgcgcagaattcggcaaagtcacgggaaaagtggcgcgtgtcgtgtccgatgaccaggcggggcttcctgcccggctccgtagtctccacatgctttttcacataaataatcaggccccgcattgcccgcccaacattgaagtagttcatgcaggcggttcccacgcagggatattccgggcggccgttcacgccgccgttcccctgctcggcccgggttacgatgctgccgatggtgcgtccccgcagcccccccgttccgaaggccagcgttttgtaaaaacggtcgttcaactcctgccattccccggcggcaaccagttcctctacggcctcgcgtgctatgggggatttggttccatccagcagaaggcggatattggtccgggaagactccaaaagcttcccttctttaacggcattcatcagggattcgtccagtgtattcatgctggcggaatagtacatcatgccccttgtttgacaatagctctttccatcatggcctgagaaaaaaacgccatattcatcccggtgcgggcgcggagaacgctttccttcccgtcccctttttatttaaagggactggcggtcatacagctcccggtacaacgggcatgaggcataaagctctgcatgggaaccgtccccgacgatgcgcccgctctcaaacaccagaatgcgcgtcgccacgcggatggaactgaaacggtgggccacaataagcgccgtccttccctccaccagccggtccagttcctgctggatcagggcctcgctttccgcatcaagggaagcggtggcttcatccagaatcagaatgggagcatccttcaggaaagcgcgggcaatcgctatacgctgccgctggcctccggacagtccgcttcctccgtcgccaagcatggtctggtagccgcccggcatgcccatgataaagccgtccgcagctgcggcgcgcgccgcagccaccacctcatcatccgcagcgtcctgccgtcccagccggatgttttccataatggtgccgtggaacaggacggggtgctgggaaacgaaggcgatatttttgcgcacatcgtgcagggaagcgtccctcacatccacgccatccacgcgcagggttccggaactaacgtcataaaacctggggagaaggctggcaaatgttgtttttccggctccgctgggccctaccagccccactacttccccggggcggatatgcacgtttatgccgtccagcaccttgcgggcaccgtcataagagaaggaaacgccgtcatagtccagacggccggcggcgcgtcccatagcaacggggtcagcggcctccggcatggtatccggttctttcaggaggtaattgatgcgctccagggaagcgtaagcgctcttcaaattggtaagcgtcacacccagccgtttgagagggtcgtaacacatgaacagggcggcggccaaagcagtaaaatcagccttggtgatgcccatttcatgcccccttaccagcaaaacgcccagacccagcgccgtcaccatttccagcacgggaaccaagaagtgcctgtacttcaccgttctgagattgattttgaaaaaacgctgaatcagccccaggaaaagatttacctgctgttcctgcattccgtaggaacggatttcacgctgggaggccaaattttcctgggctgcggccgtaatattgcccagttcgtcctgagcctgtttggacttcttcatcacgcggcggccgaaaaagcggatgggccatatggccagcgcaatcagccccagattcatcaggaccactgccgtattcggatcaacaaataccttgtacaccaggaaggcaagggcggtcagcagagtcaggggctgcttgatgatgtcattggccgctaccaccagccccccctgcacgttggcggcgtcattaattaggcggctgatcaggtccccccgtttctggcggtcaatgaaggaaaggggcagcgtctgcaatttggaaaaggcgtccagcctgatcgcctccagcactttcatgctgacgatgctgatccagtacacgttgaagaacgtgcctatgccacggacggcgaagaccagaggcagcagggaacatacggccagcagcaccgccaggtgcatgtgttccggggccaccagccgggcgatcatgtcctgaagctccgggggaatctgtgtattgtcaaacaccaccggaaatactttggcaatcatcagcggaaagccgaaaccgctggcggcggcagccagagccccggcagccagagcggcgatgaacagcttcatcacgggcttcaaataccgcgcatattcaaaaaactggcttaacatggagcgcctccttcctcctccgcaaccatctgctgcttattgtaaagttcccggtacaggggtgaagaagccatcagttcctcatgcgtgccgtccgcaaccacacggcctttctccagcaccaaaatgcggtccgccatccggatggtgctgaaacggtgggcaataatgaacgtcgtgcggccggaagccagtctctcaatctccttctgaatctgctcctcgctcttcatatccagagaagccgtggcctcatccagcaccagaatgggagcgtttttcaaaaaggccctcgccagggaaacgcgctgccgctggccgccggaaaggccctcccccatttccccgatcatgcgggaatacccttcccccgtctcattgataaaactgtccacggcggacatgcggccggcttcctccacctccgcgtcggaagcgtccggacggccgatgcgtatattgtccgccacggagccgcggaacagaacgggatactgggaaaccagcgctatgtgggaaagaagttcctttttactcatctccctcacgtcgatgccgtccaccttcacgctgccggaaaggacatcataaaaacggcacagcaaattaatgaaagtcgtcttccccgctccgctgggaccgaccagggccaccacctgcccggacggaatgcggagatcaatgttcctcatgacaggagagtcctgctggtaaccgaagcaaacgttgcggaactccacttcccccttccatgccgccgggctccttgggttttccggttcgggaacgtcatcaggagcattcagcacgtgattgatgcgttccagaccggcattaagggtttccgccttgttatggacggcccccagcttcttgaccggctcatagcaaagatacatggccgtagccagcgcggcaaaatcccccatgttcatgccgttcatgttgccaaccagcagggtggcggccatggctatggcgctgacgaactcaatcaaaggggtcagcaggctctgccacctgaccgcgccgatggatgcctggatgtaacggcggatcctgtccctgaacagccttatctgctgctgttccagttcaaaggcccggatatcccgctgggaagaaaaattctcctggagcgtggaggaaaggtccccctggctggactgcactacccgggcgcgggcaagcattttcctgccgatgtaccggatgggaatcacgcaaacgcctaccaggagcatattcgccagcagaataagaaactgctcgctgacggaggccctgtaaatcagaaaccctaacgcggccaaaagagtcaggggctggataataaggtcattggcaatctgtaccaggccgccctggagaaactgggtatcctgcatcaggcggctcagcaggtcccccttctgctgccggtcgtgaaaagccagggacaaatcctgatactttctgtacaccttgagccgcaatgtctccagcactcccagccctattttggaaagcaaatagacattgacaaaagaagacaggccgcgcaccaccaccaccagcgggagcatggccgccgtggcccacaccgtcaccaggggcaggttttccgggctcacataccacaagagcacccgttccgcccacggaggcagcggtttcccgtcaaaaatcacgggaaacatctcctgtaaaatcaccggaatgccgaaaccgctggaaacagcggccacaatgcctccgaccacagcccacaccagcgtacccttataaggaagaagatactcgcgccacaatgccctggcgcgctgaatggaggattcctgcccctctgttgactgtttcctcataagtattccggatggccgcgcccgggaacggacggcgcgcaatcggcagggatcataccatgaagaccgtgaatgacaagctccttgcgataaaaactgcatgggtaaatgcctggcgggcagacctccgggcatcccggcttgcccgccaccccgtaatggtctacctttccgtcgcatgctgaagacaggattaatccaaccggaaaccattcccggccactttccccgaaatctcagaaccatcgtggaactgtaccgttcctgcctggacgcaggcgcggagctcgtcctctgtccgccgctggccctcagcggcgtgcataccggggaactggctctgcgcagcggcttccggacccagcaccgggcggccctggcctatctggcacgggaaatagcggacgtccccctgctgctgggagcgacggacgcggaaggcataagattccacctgttgaggaacggcctttcctttccccggcaggccgttatccctccctcccctcatggaaaagaacgcgttcccgtctttggcatccggagaacggaggatgaggcagttttttccatcgccccgtggggagaaattcctccgccgcacgtttccgtcacatgcctgctgttccgcacgcctgccaatgcatggcatgagggattgctggaacaggatgaggaagaagcccgcctgacggcgcgggaaacaggcctgcccgtattcacggcccgcctggccgggggagaaggtccgtttctgctgcccggcgcatcttccgtatggttcggcaatgaaaatcttctcaaacggctgcgtctttttgaacgggattccgccgtcatttcaccggaaaaccccacaggaacggacttccccctgccctccccggaacaacagctccggcacgccctccgcaaaggaatggaagacttcattctgaaaagcgggtacggggccgtctgcctgaatttgctggaaaattccgcatccctcctgttggcggaactattgaaggaaacgtgcccctctctggaagtgacggggttcctcccctccctgcccggcattccggaagagacacgggaaagagttcaagccttcgccggcacggctggcattgacgtacggacggtttctttccctgccaaagccggagggctggacgaaaaagctgcaatcgcgtggctcatgcgccaatgggcggaagaagaaggcgccctgctgctctcttctctgacggggacggatatcatgacggcgccccgcttccttccagccgctttagccgcggatttcatgccgctgggggatttatacgaaacggaactggcaaacctgttccccggttttatttctcccgctccggaggccgccaggcgcgacgggtttctcatccgcctgcaccgggaacatgaatccgccacggagctggcgaatcggttcccggaatcggaaagggaaatccgccgtctgcagcggcaggcccgcgcatccgaatggacacgcctgaaactgccgccgcgcctcatgctgcgctccatccccggaacgcaggaaacgccttatatccatcggctggcagactgacgcggaacctcccttttcctcccgtggcatacattgcgcttgctcttgaagtggaagaagtgattagtagaagccatgcaattccatgtagcaaccatgatcggccgcgccgctttaaggctggttgaccagttggggtcaatcggattgctgctttatcaagtggcttcatgcatgtggtccggccaattccggatgcgcgtgcttgtggagcaaattgcaaaaatcggggtacaatcccagccggtggtcatcatcaccggcgcgttcaccggcgcggtgctggaagcccagacattattccagcttcaaacggtgagaatggaaaccatgggcggggccgtcgtcgccgtgggcatgttccgggaactggggcccgtcatcaccgggctgatgcttgcggggcgcgtcggatccgccatggccgcggaaatcggcaccatgaaagtcacggaacaggtggatgcccttaaatccatgaatgtggatccggtagactacctggtgaagccgcggatacaggccatgcttatttccatgcccatcctgatgatggaagccgttctggtgggcatcgcctccgcgtacatcgtcagcgtcaccgcctttaacgtagaccaggcctactggatgcacttcatgagcaaattcgtcaccatgggggacatcttcgtagccctggtcaaggctcttgctttcggcctcatcatttccaccatctcctgccgggaggggctgaacaccacgaacggcgccgtgggcgtaggcaaatccaccatgcaggccatggtgtacgcttccgtggccctgctcatcgccaactttatcctgaccatgatcctcaactctttcttccccatgggattcatgagatagcctttccccgccgccatgcagccattcatccgcgtccatcagctcagacaaagcttcggcacccaggaagtgctgaaaggcgtaagctttgacgtgggcaagggagaactgatggctttaataggaggttccggagccgggaaaagcgtcattctgaaacatctggacggcctgatggaccccttggacggctatgtggaaatagacggcaggcgcatcagcggcgctccggaaaaaatcaaaaagcaaatccgcagcaaaatcggattcatgttccagcagggagccttattcgattccttgagcgtgggagaaaacgtagccttccccctgcgggaggcggggatcagggatgaaaacgaactggacacccgtatctcagccgctttggattccgtaggactgctgggacagcaggaaaaaatgccggccagcctctccggcggcatgatcaagcgcgtcgccgtagccagggcaatcattaccactccggaatgcctgctctatgacgaacccacagcgggcctggaccccatcgttacggacagcatcagcttcctcatccggcaaatctgcaaggacaaaggcatcaccaccgtcattgtctcccatgacatgcccagcgtgatccgcatcgcggacaaaatcgtctatctcagaaacggtgaggtttactggacgggaactccggaagaactgttgcactccaaagacgaaatcctgcaaaaattcctgtacggggactccggggaaaactgggcagccctgtccggcaaaaatgaaaacttccaacgggttctgctggaacgggcggaacgggaacgcaaacaataaccatcttgccacagagccatgaaacagaaacttaaaccggaaacctgggtaggcatctttctgatcgccgggatcctgatgattatcggagtcatcctgggattcggcaacatcaaaacatccaaggagcaaacctaccccatcaacatcattttcaaagatgcggcggggctcatcaaggattcccagatacgcctgggcggcgtcacggtggggaaagtcaccaaagcccctgaactcctgccttccggcaatgaagtcatgctggaagccagcatccagagcgacgtgaaaatccagcaagggtccgtcttccgggtggacatgcagaacatcctgggcgacaaatacatcgatatcgtccctccggcccagcccacgcatgaatacatccttccccatgccaccatcatcggtcagccggaaagcgatttcagcaaaatcaaaaacaatgccgtgggcgccacagaggaaatcctgaaaatcctcaagcaaatcgagaaaaattcggacaacattgacgacgccatcctcaatatcggagaggcggccaaagggctggcccagacgaccaggctgatcaacgagggcatcctgaaccgggagaacatccagaacctcggcagcgtactgtctcaaataaaccgggcgggagaacagctccccggcctcatggaagaaacgcgctcctcggtcgcggccatgaaagacaccgtccgggatgcccgcaaactcattgccggagctgaagaaaagctcaacactctggaccccgccgtcaaggcaatcccccctacgctggccgctctgaggaaagcatctgaacaaatctcctccttcacggctgatgcacgtaaaaaccagggctttcttgggctgcttatgtacgatgctcgcttccgggccaacgctcaggaattcatccgcaatctgagggattacggcattctgaggtaccggaatcctaacgaaccccaagtcaaaccggacccccgcggcggtttttcaggaagccgccgctgagagaccgcacaattccgggtgaagccgctttacacacttgccaatagtgggaagcgtgctaaataatttccaatgtgagaggcgaaaacatgtaagtcgacatgtttttcaacaggaaccaacccttaatactctaatcaaccatgcaagacaaccaaaccgaacttgaaacgaccgcagcagcaaacgacacttcctgctcctgcccttccgcccgcgagcttgccgtcaccagatttcaacaggccagggccttcgccgcagctaaagtaaaccaaatccgcaaggcggctacggaacaggccagcaccatctgcgactacgcccaggaaaagggagaagtcatccgtgacaaggccaagaagttccacgaagcgggcgaagaatacgtgaaggaaaaacccacccagtccgtgctgattgccatgggcgtgggccttctcatcggtctgcttatccgccgtcgttaatcctctcccttcatcccgcgccatgcgtgccatgcgcatggcgtcctccttcccctttcaaaccgaaccatgggactgatcgacaaactcaagcgaaccttcgtcaccccccttgtggaggaaaaggaagaagggatggccatggtccggcccctccgggaaaccgggacggcagccctggcccatgcggaagccctggccgcgctgctcaaactggaactgaaggaagcgtccagcaggctgggcaaaaaaacggcctttctcctgatgggcgccttcatggccttcttcggctatctatttctgtggtgccttctgactgtggtcatggcgtatttctggggaatcatcgccgggcttgccgtaaccacgggctttcatctcctggccgccgcagccgggttcatccttttcagccgaacccatgtaacgcctatcgctccgacgacggcggaagaacttaaaacggatttatcatgtctgcaaatggctctcaagaaaagctcgcactcctgatgcgggtggcttcctcccggctggacatcgtcaatgaggcggacagcctggtgcaaaagacgcagcagcaggccgaccacttccgtaaattgaaaaaaaaggccatgtccctgcctgtaatcggctctattgtcggaacggtgggaggcgttcttctcatccgcatgtttgcggggaaaaaaagcaatccggcccctcccccgcagccgcgcacttccggaagctgggttaattcctccatcttccgtttcatcgttgaaattctgattaccctggctttcccttccctgaaaaaaatggggatcggcctggccggcaaaaaattcctcaacctgttcaaataacaggattttcagaccaatacagcggttttctgccgcttcttgaaaaaggttcgggaactccgctgccgtaaaaaatggggatgttcccgcgccgttaaatgagaacctccctatatccttcccgtcttccaggaaacaataaatcatgcctggcgtaaaaagccggcctgccgcgccagcccccccgttccatcatcctccccttccccggaaacaaacgcccgcagctcttccgcaaaacttcccctctcgaaattcctcacccgtcgcggaacagggcaaagccgctttcacggaaatcggtacccagacattttttgctggtcaaaaaagctctgttttcgttagtatgtagctttatcagtttgctgcattcacaacatgagcgaatacattttgccccacgtcgacggatatctcaaacttggacaggattatgactgttccgatatccaccttgccgtcaacagccgtcccacctggcgccggttcggccagcttctccccatctgggaggaagcgcccaatctcacgccccaggacacggaagtgctggcgaggggctttctggaagacccggaatggaaccgccttcagcaacggggggacgtggacttcgcctacgccaatgactttggccgctaccgcgcatccgtggttaaacagcgcctgggttatgacatctgcttccgcatcatcaacacgcgggtgcgcaccatggaggaaataggcctgccgacggaatacgtggtgcccctcacccgctacaccaacggtctcattttagtcacgggctccgtaggttccggtaaatccaccacgctagcctctatcgtggatttcatcaaccaggaccgccacgaccacatcatcacgcttgaagaccccatcgaatacctgattccctccaaaaactgccacgtcaaccagcgcgaagtgcataaacatacggaatccttcgcgcgggccctccgcggagccctccgtgaagaccctgacgtcatcatggtgggcgaaatgcgcgacctggaaaccatctccctggcgctcacggcggcagaaaccggccacctggtgctcggcaccctgcatacgggctccgcagcccgtacggtggaccgcgtgctggacgtcttcccggtggaacaacgcgaccagatccgcatcatggtcagcgaatccctgcgcggcatcatctcccagcagctggttcccagagcagacggcaacggccgcgctctggccattgaaatgctggttaatacgccggctatcgccaactgcatccgcgaaggcaagacattcatgattcccggctgcatccagacagggaaagcccagggcatgatcctgatggacgactcgctccgggccctgcaccaggcgggcctcatcaccacggaagactgcattttccgcgcggaagacaaaaccatcatgaaatccttcctgggaatcaagtaacctttaattttgaaacactcctgttatggctgtcatcgaccaatacttcaaatacctcgtagaagcgggcggttccgaccttcacctcagcgaaggccagcctcctaaagtccgcgttaacgggaccatctccgccatctccgacgaaaacctggaaggccaggcgttcaaaaaccttctcgctgaaatatgcgatccccaggccttccagaaatatctggaagaaggagacctggactttgcctatgaaatggatgaaacatcccgtttccgctgcaactacttcaagcagcagcacggcctgggggctgttttccgcctcattcccaccaaaatagccacgctggaagaactgggcgtgcctacggtggtcaaggaattcgcccatatgagatccggccttgtgctggtcacagggcccaccggctccggtaaatccaccacgctggccgctatcatcgactacatcaacagcaaccaggcgcggcacatcatcaccgtggaggaacctatcgaattcgtccatcccaataaaaaatccatcgtcacccagagggaagtgcctctccagacgccttccttcgcagacggcctccgggcttcccttcgtgaagactccgacatcgtgctggtgggtgaaatgcgcgacctggaaaccatctccctggcgctcacggcggcggaaaccggccttctggtattcggcaccctgcacacgaacaacgccagcaaaaccattgaccgtatcattgacgtattcccgtccgaccagcaatcccaggtgcgcaccatgcttgcgggttccctccgcggcgtcgtggcgcagctcctgatgaagcgcagcgacaaaccgggacgcgtagccgtcaatgaaattctctttgccacgccggccgtggcggccatcatccgtgaaggcgccacgcagaaaatccctgacgtcatcgtcggcggcaaggccatgggcatgcaattcatggatgacgccatctggcaaaaactccaacagggcatcgtctccccggaagaagcctacatgaagtgcattgaaaagaagagattccgcaacttccttcctccggaatccgcccgcctggcagactccggcggcggaaactaagctctttgccctccttctcctgccatgtctcccactggaaaattcacgctcaggcttgtgatttatggagccttcctgctctatctggtgggagacttgtttgtctggcacggctttctggccggcaggatggacgcgtacctgaaaccgttgccggggccgccaggagacaactccgcccggatagcggaagtgtacggggaacccgtcaccgccaaccagctttcccgaagaatgacggaactgaaaatgctgcgccagcctcccgtgctggatatggaaggcgggatcaaacttactcatgaactggacatccccggcgacctggctccgcgggccaggtatgacctgatcggctcctcccttctgcgcctgaaaaccagcgtcaatgacctccagctccccaaccgcaacgcggaagcggcacgcgccgtggaacaaatccggtcccgttttgacggagacacggaacaatacctgaaaaccctgcatggtcagaaattgacgcaggaacaatttcaaaaaaaaatagcggccaggctcaaacagacggaacagctctaccgggcaaccgcccaggcggcggaagcgtccgacgaagacctgaaaacctactacaacctgatccgggaccagctcacccctcctgatctgcggaaaaccaggcacatcttcctggctaccctgaacagggaagaagcccaggtccggcaaaccgcggaaacgctgctggagcggctgaaggcaggggaatccttctcccggctcgccagggaattcagtgaagacgaacgttccgctcccgcaggcggggaactcggctggataagccccgcccgcgccaaggaaaccctgggtctggcgttggcagacgtcccggacaacaggccggtacttctcaaaagccggtgggggtggcaccttgtggaagcatcccctgtcaaaaaagggaaaacgccatcctatgaagaagcgcttccggccctgagggatgcagcccggagcctcagaaaagctcaagccgtgggattgtacatggacggcctttttgaagaagcccatctcagaaaccgcattaaaaacaagcagggccgctgacgccccaattccggcaaacgggccttcgcaaaaatcggaaacatcaggcccgcctgcctttacacctgaacattcccgcaggccctccggcttccagaccggggcgttcctcctttcccgtaaaagccgggcgttcccggaaatagccatcttccctgcggacggcctccggcagtcatgaaatacccgcacgagatgaggaaaggcggcatcttccttcttatttgcctttcctgacgaattccgcttgctttcaaacgcgggatgaactaaattctttccggtatttcccacggggtattagctcagttggtagagcgtctcgttcgcaatgagaaggtcaggggttcgaatcccctatactccaccatccatctctctttcccgctactgttttttattcgggaataacgggtagccttatgaatggtaacttatttaaaattgtactggtttcagtcgttgccattcttttagccatcataggcggcatcatgtcggcggacggcgatcccttttctatagttctggctgtttccccctttatcctggccgccttattcctgatgaagggaaaagtgtggtatctgtggatactgatacccattcttttcctgcccatcccctccttaagggattacgctccccttcttgcttacggaataacccttccttgttacttgtggaacgccatgctcaggcgttcaagcttgacgtggaattccgccccccttctggacgctgtcgtcctcgtgctgttcatgcacgtgggctatatcttcctgagccaccctttcgctctggggctggatgtgctggaagactactacggaggcaagggatacatccttttcctccaggccctcctggcctatctctgcctatcctcgttaaaaacgaccagccatgaactgggcaaggtgcttcaatgggctgttttcctgaccatcgtttttacccttatcctaaccgcccggagcctcctttctccggatagcgccggggcggatcttgccgcgagcgcgggctccgcaggcacactctccgaaaactcccggaactcttccttcctcagaatttctatcttggtgatgcagctgctcatcatcaactactccgtgtggcagatgatcaaacgtccctggtggggggcgttgcttcttcttggaaccgttggcatcctgttaagcggatttcgctccgccatggcccaggttctgttcctgttcttcaccatatccctaatttacagaagatggttcttctgccttctggctcccgtcctcggagtgctattgctcttgctgctctcctctgcgggcatgctccattctctgcctttcggcatccagcgcaccctctcagccgttcctttcctggacgtcagcgcgcaagccaaggcaaacgccgaagactccatcaactggcgctttgaaatgtggagctgggctctggatgaccgtgaacactttattcaggacaaaatattcggagacggcttttcacgggatatcagcatcgtgaaagccaatgtgtatgaagaagcctacaacctgagcaaagaccaaagcgcctttgcttggaacggccaatggcacagcggccccatttccacaattcaaacgctcggctacatagggatttccctgtaccttatcctgtccgtcgttggcatgacctacgcatggatcgtcagtagaatttaccgcaaccatcaatacaagctcggcatcctgtatgtttccgccgtctatttcaccaaaccaatcttctttttcctgatctttggggaaagcatcaccattgcgatggacatcatatccctggccatcatcaaagtactctactcctgcgccaagagggagggcctctatgtatccctccatgtccgcaaggaatacatgccgctcatgatccggaaaacgcaggaaaaacggcaagctgccgcaacggcatccatttccggctgactgttccttccccggaaaaacaggcgttccctatgcttgaggctggactaattcaaagggagttgctacctttcggggcggttccttttcccatggcagcagatatttcccaccacatcatcggcctcattccgtcacgctggggttcctccagatttccgggcaaaccccttcatcccattgcaggaaaacctcttgtccagcacgtatgggaacgcgtctgccgctgttcccgcctggacgccatcgccatcgccacggacgaccagcgcatttttgacgccgccgtatcctttggagccagggccatcatgacctctccggaccatcccagcggcagtgaccgcctggcggaagcggtacgttccttccctgccgccacccatgtcgtcaatattcagggggacgaacctctcattgacccggccctgattgacaggctggcggaagccctggtctcggacgaaaccctctccatggccaccgtcgcctgccccatcagcacccgggaggatctggacaacccgaacattgtcaaagtggcccttgcccgtaacggagacgccctgtacttctcccgttccgtcattccctacgcccgccatccacgcgtagcgccacccttgcgccatctgggtatttacgcctaccgccgcgacttccttgaaaactatgtgcgctgggccccgacccccctggaacagacggaatccctggaacaactgcgcgcactggaaaacggggccagaatccgggtcatcctgacggatcacgtcagtgtgggcgtggatacgccggaacaggcggaacaggtggaacaaatcttattaaacatacactaggaaacaaatcatgaaatatatcttcgtcacaggcggtgttgtctcctctctcggcaaaggactggcggcggcatccatcggcacgctgctggaacgctgcggactcaaggtaacccttcaaaaattcgacccctacctgaatgtgaaccccggaacgatgagcccgttccagcatggggaagtgtacgtcttgaacgacggagcggaaacggacctggacctgggccattacgaacgcttcgtccattgcagcctctcccggctcaacaacctcacttccgggcaggtctttgaaagcgtgctgcggaaggaacgccggggagactatctgggaaaaacggttcaatacattccgcatgtcacggatgaaatcaaaaaccgcctctatgaagtcacggaaaaatcagacgtggacatcatcatcacggaaatcggaggcacggtcggggacatggaaggccacattttcctggaagccctgcgccaattcgccctggaagtgggccgtgacaacgtctgcttcattcacgtcaccctgctcccctatatcaaggccgccggggaaatgaaaacgaagcccacccagcaatccgtcgccaagctccgggaaatcggcatccagccggacgtgatcatctgccggacggaatacgacatgagtgaagacgaacgccgcaaaatcgccatgttctgcaacgtggaagccaaaaacgtcattgccttccgtgacgtcaaaaacaccatctacgaatgccctctggatctcagccaggataaaatagaccgcattgtcaccaggcggctgggactggacgttccggcgcccaatctggcggactggcagcgttacgtcggcagggtcatcagccccagccactccatcaggattgccgtagtaggtaaatacatcgctctccaggacgcctacaaatccatctatgaatccttcactcacgccggtgcggaaaatgacgcccgcgtggaaattctccggatagacgcggaagaaattgaggaaaagggcgcggaggccatgattggctccgtggacggcattctggtgccgggcggctttggagaccgcggcattgaagggaaaatccagacggtggaatacgcgcgcaccaaaggaatcccgttcctgggcatttgcctgggcatgcaggtggccgtcattgagtacgcacgccacatctgcggcatggatgacgccaactccacggaattcgaccagaaaaccacccaccccgtcatcagcctccaggaagagcaaaaaggtatcaaggccatgggagccaccatgcgcctgggcgcctacaaggccctgatccggcccggaacgctggcgcacaagctttacggcaaggacagcgttacggaacgccaccgccaccggtacgaattcaacccggcctaccgcgacgaactggaaaacgcggggctggtcatcagcgccgtcaatgacgaacacggactggtggaagtcgtggaacttcccgatcatcccttcttcatcgcctgccagtaccatccggaattccagtccgctcccaaccgggcccacccgctcttttccggcctggtttcagccgcgctggagcacaagagccactcctgaccctttcattaagcccggagccttttccggaatttcctttccggaaaaggccttctctttccaggcatgctcacggaccttttcgtcatcgtcatttactttctggctatcttctgcattggcatttatgcgggacgaaagcaaaactccctgacagactatgccctgggcaaccgctccctgccctggtgggctattctggcctctatcctggcggcggaaatcagcgcggctaccttcctgggggctcccggagaaggataccatacccgcaacttcacatacgcccagctctgcatcggcaccatcctgggccgcatcatcgtcggcaggctctttctcaagccctattatgactacaaggttgtttccatctatgaatacctggaaaaaagattcgggctcctgacgcggcggacagcctccatggtcttcctgatcagccgggtgctcgccagcggaaccaggctctatttcgcgggcattctgctggtcattgcctaccagttcctgacaggcgtcacggcagacgccgaccagattgtcctgctctacattgccgccctggttgccatctccgtcgccacgacaatttataccgcgatcggaggattgaaagccgtcgtctggacggacgtcctccaggccgccgttctgggagtctccatgctttccgccctgtgggtactgttctcccatatccccggagggtggagctccatctccgccgccatgaatggtggagacgattggaaattcttctcctggggaaccggagaaggcctggacttcctccaacaaggcgcccgcgtgctgggccaggaatacacggtgtgggcagccttcctgggagcaaccttcatcaccatggctacgcatggcacggaccaggacatggtgcagcgcatgctggcggcaaaaaacagcaaggcgggaacgcgtgcagtcatcgtatccggcttgctggacttccccatcgtcatcattttcctcttcacgggcattcttctctatgtcttctaccaatacaacccggcaaacctccctgcagacacgccgcagctgcatgtgtttccctacttcatcatccatgaacttcccaacggcatccgcgggctgctgatcgccggacttctggcgacggccatgggctccctctccacggctctaaactccctggcgactaccgccaccaaggactggtaccaggggatattcaaaccggaagccacggaacggcagctgctccggtgcgtgcgctggggaacggccgttttctccctgctgctcatcctcgtgggttccatcacagcgtggtatgtggtgcatcacccggaagtccgcatcatccaaatagccctgggcattttcggctatacctatggctccctgcttggcattttcctgttgggaatgctgacccgcaccagaggcagcgactcaggaaacatcattgccatggcggcaggattctttgtcatcgctttactgacggaactcatccctctgccctccggctggcaacaatatgttccggaaatagcatttccgtggcgcgttaccatcggaactctggttacttttaccgtcggcttctgtttcagaaagcgccgccttcccatgcgctgaacggtgaacgccgttacttggccacgttcatgttccgcattccccttcaaaccgccccgtcaatgggagtaaaggtgcaagcgaaaaataggggattaagggataaaaatccctgagggagggcgccccctgtccaacgggtgcgccggaactccttctaccggacacaaaagcgccgctttcccggaaagggaaagcggcgtgaaacggaatggaaacacgctccctccgctacacttcttcgggggacagccagcggaaggaaacgatgttgaactttcttccaaacgccttgttcacggcgctcagctccgtatcctccagcgcgccgctcttcatgttgacctgccgggccggagtttccgggctgttcaccggatccacgtagttgatccccctctgcaccaccgcttcgcaccacgcgcgcgacagcaccaccccttcgcggttggccagctctccgtaggcgcgcaccgtaaacgtatcgtccctcgtcgtcaggatgttgcccagaaccgccagcacgtcagactggatcaggtagccgggggcggccgtatacaccgatcccctggccgcgtcctggttcgggtagcctcccttgggcgcgatcaccatgtcggaaagttcgtcaaacgtgctgttgatggagctctcgtcaatagccgcctgaagcgctcccttcacccccatttccccgctctgcagacggcggttgacaaagtcggacatgttcaggaaggggcctctctttttgacctccttgaccatgttccgggccagggacctgatttgcgtgtcgctcagggttctcagatccgaccacgccatagcttccccgtccgggatgccctgggtcacccctatcgaaccatagtcgtccacgtgggacttgtcgctgctggccactccgaaacgggaaaaggacgtctgggagttgttgagcacggagggcctgccgctcctggaatagagaatcttgcgcttcttgagccccaggagggtggcttcccaggcgcgctgggaggtggagttgacattgaatcctccggcgacggtgaggtacttggaggcatgcttgtagccttcgtccgttctggcgagttcttcgacgacagcttccgagggtttgccctgaaggtcgggcaggaagcggcggttggcgatacctgaagccctgttggatgaggcgtccgtagagaaagcctgctgaagcacggttttaagttcttccctgcccgtgcccccaaggctggaaggacgggcggccagggaggaggcgaaccaggagtcccagagggcgtcgttgatcatcaggccgtggtcccagaagtcccccagggcggcgtcccccatgatttcgttgtgggagaaaaccttgtcggcaggaagcatgggatcggcaaaagcattgccgatgcctacgcccggcacgccggactggtaggcgaagcgtttggcgatagccgccctggagtcgctcctgtaccatcccggggtgaggcggcatccggcaaagccggccaggctggagggctgctggaagggaagctccgcggcgacaatcttgttgacctgctcggctcccggccctccgaagggggagagcctggtgccgtcattggagaggatgttggagatggtaatcgggaagaaatcgctgttggcgttcttgacttcaaactggtacgggctgtagaggcgccccagttcggaggcggtgggcatctggcctccccagaaaagggggctggagtgctgccatgtcttggcccggtagtccttgccctccggataggctcctatcacggggggcttgccccattttaccgatactccatagtaggcgacaaacgtggagtccaaagagggcgtgccgtattcgcccgcttttttagcttcttcattggtcccttcgttgcgttcccacatttctgcgggaagtttaatttggtcaacaagaggtttttcccaggcaccccagttcaggttgaggatggccggcatggtcttggagaaaatttctatttccgccgtgcttttcccattcagggaagaggaactgttcattttgttgggatccatcaggccggcccccatcacgaaggttcccagggctttggaggcacccttgtctccgtatttgacggcgagaacatgattgtccggcgttccgttgagccggctggtatcttccgcgaagataacggaagccttggcaatacctacctggttatatccgctgccgtccagaagttcataacggacgccgtccgtcaggttgacggcataagagctgacttgtcccggttcctgggaccatccctctttgagcgggaatctgtccggtttgaaatcaccgctgttgggctttgttttgtaaacttcgttaccgttggcgatattggaaacgaccggctgggcaaagacgacgatctcgcctgctttcaaggtggaaggctctcccttgacggtggaaccgtcactgttaagtttggccgtagttcggaaagaggcgccgaaatccgccacctggcggttgttataagaagcgttcaaataggggatcaggcaggattctccataattggagagtgcattctcatccagttggttccatgcgaatttaacattatgggaaagcagcaggggcatgaagcggtgctcgccgaagtaggcgccccagacacctccgttggccccggtcagcttcatatccacattataaggattccaccagacgtacacgggaatgacggcaatacggaagtcgatccatcctccacggttgggatgcttgttgccgtgtttgacgtagttaagtcctacaaaggaataaaagcgcagcaggatgggatggcgcatgtacgtgtagcggttgtccatcatttccatgctggctgcggagtccgccgcaatcagcgtgctgggagcgcttccattccattgaagggtggcggaggcatcctggccttccctcttcgtggaggagtcccacacgtttgcccacaggtaaagctggttccaggagccgatcggccggttctggtccgacgggttgccgtcctcggacgtgtacggacgcaaccctatgtccgccgtatcgccgcgaaattcttcaggaagtttttcctgggaaaacataatgttgaggtctttcttaagaccgccgaatttagaatccgtcagcaaactggaagaaaccagagagatgtcgtggtaaacgtcacccaaatccttcaaacgtccgtttttattgttggccagcagagaatcaagagagataagctttctgactgcggacatgtcgttcccggatcccgccgtcattacggaagaaagattgagagactccagatcggggccgggcgtatcccaggtggaacgcagcaccgtcagggcatccgtactttcttcagaagcatgcggcatcaaattgatacgcgctttctggttttcccccgtgacccaccaggctatatatttacgggagttagcattctttttcagtcctgtggtcttggaggaatcatctacgcgcaccatgcgggcgtagatttcctttttatcctgattcctggctccaacgggtgtccctatcgtgcctggtcccaccagggcgacgctacggaagttctggttagagagagaacgtttgcccaacaggtttttacccgcttccagagaactgagcctgcgcaaatcagggtcggaaatgagccagcggcggaacatggattttcttcctgtatcataggtggccgagatgttcataccctcggagttattcgtattgagccaggaatcccagctgttccagacacccagaatataaggggcgtttccttcgatggttccggaagaaagaatgccggaattggcggaaacacgctggtcagggcccaattcacactgaagctggcccaaagctacttccagggaaaatctggcgagggatttggcctccgccgcaaaaagctgtttctcggaaatacggacctgtgaagatgcaatggttaaaaggccgacgctgaggagggctaaaagcatcatcagggtaatggtggcaatcagggcaaaccccttgctgacatgcctgacaggacgtttagtgaaaagtttgatcttcatgaaaatgatgggtttcggcaggcccctttccgttcgagtgtgaggaggaaaaacctctgctgtcacaaaggtgcgaagagccaattcttaactctagccaatacaaaaaagaggcagttcatgcaagctcaaagttggttcaacagggcacacgttgagcagggcaaacaggctccgggacaattggaaagaaaaataaggcaagaaaaatcacatttttatccaattccgttcttaaaggtttatattatgatttttatagaaaaatcggattctaaattctgtggattaaaaaaagacttgaatatcatattttctcaagaaaaacttcctgaagaatttcgcggcgatacggcggacatagggttgcgtccgtacacgtccgaggacggcaacccgtcggaccagaaccggccgatcggctcctggaaccagctttacctgtgggcgaacgtgtgggactcctccacgaagagggaaggccaggatgcctccgccacccttcaatggaacggaagcgctcccagcacgctgattgcggcggactccacagccagcatggaaatgatggacaaccgctacacgtacatgcgccatcccatcctgctgcgttattacaattttatcggttcttatttaacaaagaatgatcggcaatctcaaaacggaggctggattaacacagctgtatcagtcgttcctgtttatgtctggtggaatccgtataatgtggacatgaaatttcagggagccggaggaaatccatggggctcttactttggcgaacatcgttttaaacccatgctttttgcggataacatcgcttcctctggacctctttccagcttaaaaatgtatacggagcatcctctgacgccatatacgcaaggggctttcggagctatacatgatcggcaggtagccgatttcggtgcctcttacaggaaaacttcccggctgaacgacggtacaggagaagtagtgaaaggagaggtatctgttcttaaagcaggagaaatcgttgttttttcccaaccatctacaactcgtaccaacaaaattcaaaatggtgctgtatataaatctaaaagtgggggatatgatattcgaacggataattttgcttttagagaagggtggccgcaagacatgagtgagatggtttcttatggcgttaatatatacacaggtcttcaatatcaatactttgaaagatctggctatccaacagagaataagtacacgttttgggcccgctttgcggaaacggataatgacctgatagggaatggaggaaatacctccttgggaactcctcccaatcatgttctgtgccataagtatacggacgaatacaactccaattccaaaaaattgggaactttcatgatgggtgctggcattatggacgccagccaaattggaaaagatacacgtttaagcggggcttccacaccggaccctgtcgttttttctaagatgtccccaacgatgctcaatctgaactggggatttgaggaacaaatcatgcaggcgacaaaaataccagtagatggatggattaacttcaaaagagatgacgatgaagatggcacgaaacgcggcaaatacgcagaacctgagccgaacggtgcattcccctatttcatcgcctactatggagtatcggtaaaatggggcaagccccccgtgataggagcctatccggagggcaaggactaccgggccaagacatggcagcactccagcccccttttctggggaggccagatgcccaccgcctccgaactggggcgcctctacagcccgtaccagtttgaagtcaagaacgccaacagcgatttcttcccgattaccatctccaacatcctctccaatgacggcaccaggctctcccccttcggagggccgggagccgagcaggtcaacaaaattgtcgccgcggagcttcccttccagcagccctccagcctggccggctttgccggatgccgcctcaccccgggatggtacaggagcgactccagggcggctatcgccaaacgcttcgcctaccagtccggcgtgccgggcgtaggcatcggcaatgcttttgccgatcccatgcttcctgccgacaaggttttctcccacaacgaaatcatgggggacgccgccctgggggacttctgggaccacggcctgatgatcaacgacgccctctgggactcctggttcgcctcctccctggccgcccgtccttccagccttgggggcacgggcagggaagaacttaaaaccgtgcttcagcaggctttctctacggacgcctcatccaacagggcttcaggtatcgccaaccgccgcttcctgcccgaccttcagggcaaaccctcggaagctgtcgtcgaagaactcgccagaacggacgaaggctacaagcatgcctccaagtacctcaccgtcgccggaggattcaatgtcaactccacctcccagcgcgcctgggaagccaccctcctggggctcaagaagcgcaagattctctattccaggagcggcaggccctccgtgctcaacaactcccagacgtccttttcccgtttcggagtggccagcagcgacaagtcccacgtggacgactatggttcgataggggtgacccagggcatcccggacggggaagctatggcgtggtcggatctgagaaccctgagcgacacgcaaatcaggtccctggcccggaacatggtcaaggaggtcaaaaagagaggccccttcctgaacatgtccgactttgtcaaccgccgtctgcagagcggggaaatgggggtgaagggagcgcttcaggcggctattgacgagagctccatcaacagcacgtttgacgaactttccgacatggtgatcgcgcccaagggaggctacccgaaccaggacgcggccagggggtcggtgtatacggccgcccccggctacctgatccagtctgacgtgctggcggttctgggcaacatcctgacgacgagggacgatacgtttacggtgcgcgcctacggagagctggccaaccgcgaaggggtggtgctgtcgcgcgcgtggtgcgaagcggtggtgcagagggggatcaactacgtggatccggtgaacagcccggaaactccggcccggcaggtcaacatgaagagcggcgcgctggaggatacggagctgagcgccgtgaacaaggcgtttggaagaaagttcaacatcgtttccttccgctggctgtcccccgaagaagtgtagcggagggagcgtgtttccattccgtttcacgccgctttccctttccgggaaagcggcgcttttgtgtccggtagaaggagttccggcgcacccgttggacagggggcgccctccctcagggatttttatcccttaatcccctatttttcgcttgcacctttactcccattcatgtacttcacaagggataaaagcccatcaggggcctgccatcgcgctccgctgcgcggatcgatgcccatgcccttccgcatttcctccttgcggttatccgccaaagggttatgcaatgtatcaaaactttttccattccccagaatccagaatatatgcgtattttacccatcctggcctttacctgccttttcggaagcatttccttcgcccaaggacaaagccgcaccccctccaggccggaaccggcccaaccggcagcaaatgctccggcatccgataccgtggacaagtccctgccgccagccgccgtcaacggcatccggttcgttctgaaggagcccatgtctcttccttctcccatttacatgcctattgattccaaaaggctggaaaaagtggaaatccgcgccgcccttccggggcgccgcagcgtttaccccaagagcaagatcattaccctgttcgggggcctggaccagaaaggcatgccgaccaataaactcgtcagcaagcccctgccgcccgatcttggctccaaaaccctggctctggtcggcaaaaacagcaaaggggaattgacgctggattttattaatgagtcggaactgccgctgaactgcgtttacatccagaacctgaccggacgcacgttcactttggaacttcccaaacctccctcgggagaaaagagcgctatcgaactgcccagcaaatccacttacattttcggcaagaactctacagacagcaacatttcccgcaccacccccgccaatttgacgtacatgacccgtttaaagaacggcaaagtcgtcaaggtgaaggacagaggcatgatgctgacgacctacccgggacgaaaagtggttatgattatttccccggattccaccggccgcaccgtcgttttgacggaactgatgattttcaaggaaaggccgggagcggcttcctctgacaagtaaattttcttccgatatccgggaagccggaagctgctctggagtatatccggatgattcagaaaaacgggcattgctgcccgtttttttatttttcttctcctgacgccatggattgagggaataaaccactccggacatttttccggcacgggaacaatgtccgccctgtttcccgcggctccaatgcggcaggcggagaaagaggtctcgaagccatgcggtttgccgaaaaagttcacctgccgccttccggcatccgggcaggcttaataaactttgggcaccagtccctgacggctcatcttatcctccacctttcgccggttttcctccagacgccgggcgtcataggaatcatccacaggctgggcctccggaatgttttccccgcgtcccgcccggtattgctgaacctgcgggagcactccttccaccagttccctgcatatccaggaaggcaggatataggtctccgtgcgtccggcccggctcagagccagcccaacaaattttccgttgacgtcaatgaccgggcatccggcccgttccgggaacaaggtcatgtccgactggataaccaaagggaattcatcccttttcaagctcatccggttgcccatggagttcatcatgtcgagacgcttttgcgggaatttcatcaccctgggcctgggccccgtgaggagttttccttctatcacctggttccgccgccttacttccacgggaaccgtctcaccgggacgcaccccgaccatggcggcacggatggagtacattccatccaccggctttccattcagcttcatcagcacatcgccggccgtcaatccgctgcggtgcgcgccgcttccggcttccacaccgcctatcatgaccccctccccgtcccagcggggatcggaaacaatgccgagataaggctggtcatccgcccgcaggctgcgctgagccacggaaacgactccgaagtcgctcacatgccccgtaggcgacacggctgcaatcacgtccccttccttcgcctgcacataggaatccaggtcaatgggaggagcgggaagccccggcacatccatcatcagcagatcatgctccggaagggcaaagagcaccttggcgtcataaacccgcccggaagaatccaccagcatgaccggacgccgttccttctggagatcgctcagcttggtgaggacttttccctttcccaccactgttcccaaagccacctgggtattgccggcaaccagagccactacggactgccccaccggaacagccaccttgtcccactcccggaaaatctccttggcctggctgtccagcacgcttttgtcctccggggcaatcatctgctccggaggcaatggggaagctatttcctgggcatacgcggaagccgccgcaaatgccgcccataaatatttcatcatcatccttgagtttgttcctggtatttcaggccggacatcaagtcgccgcgcctgccgaatgtaagatccgccttgtaagccgtacctttcctcaccaccaccaatggaacggtttcccccggacggtgcctgcccagttcacggagcatatcccgcacggaacgcaggctccggctgtccatgtgggtaatgacgtcccccggctggatgccggcggtatccgccggagaattcaccacaacgtcttccaccaccacgccgtccacgcccagcacatccatcatggcaaacccgagcacaggagattcggggtccgccatgggatgaaggcccagctggccccaatgcctgccggagagcagtttgtcccagtctctcctgaaaacggaaacagggacatggttgttgattttcaacatagggccaatggaggaatggatgccaaccaacttgccggacaggtcaaagaggggaccgccggaatctccgccaatcagcgtacattccgaaataaggaagcgctgctttccgtccgtgcacaatcttcccatgcggatgggcgcgcggcgttccgggtcaaatcccttggaatggcccagagccaccacaaaatcccccacatgaagaccgtcggattcccccagttccacatgaggatagttgcctccgtccatgatttgcaccatggcggcatcccgcgtgaagttggcgcccagcacccgtccctttaccacgcgcccgtcggcaaagaccacacgcatgatttcatcgccgcccacgacgtgggccgccgtcaaaatcaggccctgcggagagacaatgacgccgctgcccgtctctcccccgtcggaaaccagagccaccgtagcagccgtaaccctggaggccacctcatgcacatgtttctgcaaatccgccatggaagaaacattccccgcaaggctcgccccccctgacagcagggacacaagccccccaacgaccaagcaacaaaaactcgtcattctcaatagtgatatcatgaaattaccgataatcgaatgataggacataccctactgtataaacgttcaaaacggcagaattttgtctatggattgcgacatggcgccccatcttttgcttagaccatttcgattatttatgataaagtccggctcacggatgggtttaaacgacaaatcaaggaaacgaaatgccgcctcctggagggaacgcatccaagatggagaaatttcttcccgttcccagacggaacgcaaaaaaaggccccttccccgtccatcctatcccgggttgccgcaggaagctcctgatccggccgtcattcccggccctacccgcagaacgggaaattcccgcaacggcccttcccggtatgacacgccgccccagcgacgggcctcccgcccgtctccgaaggaagagtacgaaggcaatccggaaagagaagaagaaaaccgtcccgcacgcgcaggaaccatgcgcaggccgcgtttcacgattttcggagccctgctgtttgtcctgctgatgccgttccgcttcatcggctccctgacgcggaatatccgctggttcatttgctggcccctgcgcatccttctgggatgctgcttcgtcggcatcgtgatcggagccatcctggtgtttctttacggcaccatttccaaccgctatgacatttccgaggtaaagagcaacattccggaacgcacggtgattctggaccgtaaaaaccggactatcggaaccctgcacggggaaaaccgcaagcgggtatcccttcaggaagttcctcccgtttttattgatgccctgctcctgcgcgaagacaaccgcttttacgaccatggcggcgtggactggataggcgtgggccgcgcctttgcgcaggtgctcaagcacaaaagagccacgcagggggcttccaccctgacgatgcagcttgctaaaattacatataaccaccgggagcgcaacctgcattccaaactgacggaagtggccctggcgaaacgcattgaagccacttatacgaaggacgaaattctggagacttacatcaaccgtattttctgggggcacaccttcctggggatagcggcggcggcgcggggatattacgacaaggaaccccgggatttatccctggcggaatgcgccaccctggccggcattatttacggcccaaatgatttttcccccatcaaacatccggaggaagcaaaaaaagtgcgcgatattgtccttggcctgctgaaaaacgaaggcaagattacggaagtgcagtatcaggcggccctggcggagcctatcgccacccggacgccccagtcccggtctgaggaaaattacgccatgggtctcgtgcgccgggagctggacgccattctggaggaagaagacatccgcctgggagggctggtggtgcataccacattggaccttgatctgcagaacgccacgctggatgccatcaataagcacatggacgcgctggaagcccgcaaggatttcaagaagcacctggcttccctgcaggccaagagggagaagaggggaattttgaaaaacaagctgaccaccaaggcggaatatgaggcctccctggccgcctggaaggcgctccctgcggaacagaaggaaaagacgcagccgccgatgcccaactacatccaatccgccgccgtagtcatggacaatgccacgggggcccttctggccgtcgtcggcggccgggacgcggaagaatccaagctgaaccgcgccattcagtccaggcgtcagaccggctccctgttcaaaccttttatttacgccacgtttttccagcagggcaattctgcggatacccgcatttcggatgacaggattgcctacggggaaatacgcggagccgccaactggtccccccgcaattcggacggaacgtaccggggcatgaagccggcctccttcggcctcatcctttcccgcaacaccatgtccgtgcgcatcggcaaccgcgccggtttgtccaatgtcattcaatccgcacaactggcgggcttccacggaaatatttcccgcaccccggccctttatctgggcacgtgggaagcgtcccctctggacattgccagcgcctacagcgtttttgccaacgggggcgtacgccccacgccgtacatcattgaccatattacggattcccagggccagccgcgcttcgccatcaccaagagcaagcgcaccgtctattcccagcgggcggcgaacattacctcttccatcctccagcaggtctgcaagcccggaggcacggcaggcaaaattaccacgctgggctttaaatccccctgcggcggcaaaaccggaaccacgaataattatacgaacgcatggttcgccggatatacgtccaacctcacctgcagtgtctgggtggggtttgattcctccaccaaaattctggaaaaaggctacggaggcaccctggccctgcccgtctgggtggacattatgcttgccgcccagaaggaaggctatcccgccaacgccatccgtacgcgtcccggttcggaagggcaggccgtactcgtctgccgggaatccaatcaactggcccattccggctgccagtacgccaagactgcgtattttgaaacctccgcaggctaccaggcccccgccaacatgtgtgaacggcacattcccatggcggaaccggattcggaagagagcattccctatgcggaaccgctggacggcagcgacgataacatccccctggccgaacccgtggaagaaacggacggcatcccctacgccacccccatctgattgcttattttttccttatgattcccccattttttccctggttcctggcctttttgctgctgatcgcctgcgtggcgctgctggttctgctgctgcggtaccgggaccgttccgtccgcctcgaagcggaatcccgctcctggcaggaacgggcggaggacagaacccagatgctccgccgggcggaagaggtgctgaaagattccttcgccggcatcagcgcggaagtcctccggaactcggagaaacagtttctgaacctggcggaaacgcggctgcaaagccagcgccagcaggccaaccatgacctggattcccgcaaacaggccatcgagtccatgctgaagccggtgagcgaatccctgaaactggtccagtcccggctgggagagatggaaaaggaacgcgtgggcgcctatacggacctgaaaacgcaaatccgctatatcctttccggcaatgaagccctgaaaaatgaaaccgccaggctttcccaggctctgcaccacaacagcgttcgcggccaatggggagagctccaactgcgccgcgtggtggaactggcgggaatggtggagtactgcgatttcacgactcaggaaacccgttccagggaggaggaacgggtgcggccggacatggtcattcaccttcctggaggccgttccatcatcattgacgcgaaagcgcccatggcatcctacctgaatgccgggcagacggagaatccggaagagcgcagccagtggatggcccgccatgccgcggacgtcaagaggcatttgcagcaattaagcgccaagaattactttgcccaattttccccatgccccgaattcgtcattatgttcctgcccggggaatcctttttccaagcggctctggaagcagacccctccctgattgaattcggcgcggagaataaagtcatcctttccaccccatccaccctgattgccctgctgaaagccgtcgcttacggatggaagcaggagcagctggcggataatgccaagaaaatttcggaagcgggagcggacctgtacaatacctgctctatcctttccggtcatttttcctctctgggcaagagcctgaatcaggcggtagcccagtacaacaaaaccgtttcctcttttgaacaccggttcatcccccgggcccagaagttgaaaaacctgggcgtcacctccacgaaggagcttccccgctccctggaagacattaccgaacaggccaaatctgcggatgttccggatactacgtcctgaaagagcggcaacaatacgtctttttcccttcctgcccatttccgagccgggaaaatacagctctaaggcatcccccgcaaacgctttcctgcgcttgaaagcatcttggaaatgtagaggaattcagcctccgacggccctgcacttcccgggattttcaacaattcctatgcgcggcaacgggaaacggcaggctgctttcctcatgcagccgggcagataattcccccgcggcggcgcacaccggcacccggaaggcatccagagcagaacgggaactgtagccccaccccaccagaataagccgtgttccggcgttcacggccgtgttgccgtcatgggcggagtcccccaccatgcacacctgcgccggctccctgccccaggaacggacgatggacagcagggagtcaggttccggcttgcgcggaaagcgttcggaaaaacccatcacctcccggaagggaatttcaggcaggatatggcgaaccagcggcaccgtaaccgcatggggcttgttggataaaatgcccagaggatggccttctccggccagggacaacagcatttcccggatgccggggtacggaaccgtgccctcctgccaggtgtgcgggtattcacgcatgaatccccggtgcaccgcttcaaaagcttcctccggcacgtttccgttgaaatagcctttcagggaagccaggcaaagctcccgggcccccttgcccaccatttcccggatggcgtccacggaatgctccggatatcccagcgccttcaaggccaggttcaggccgcgggcgataccgggaatggagtccaccagcgtcccgtccaggtcaaaaacaaaacccgttttcatggattcaatggcagaacccccgttcggaagtttccacgaattggatgattctcctcaggcaggcattttccgcataccccgaatgccgtagttcctccagagcttcatgaacggtcagctttttattgacgaaaagctttttatagcacatgcgcacggctttcaggtcttcttcggaaaagccgcgcctctgcatgccgatggagttaacggaacgcgttacggccgggtggccctccacgatcgtgtacggcaggacatcctggctcacgcgggccattgctcccaccatggcatgttccccgatgctcacaaactggtgtacggcgcaacatcccgccaggatggcgtaatcccccaccgtaacatggccggcggcggtagcgaacccggagaaaatcacatgattgccgatctggcaatcgtgcccggcatggcaggaaaccaggaaaaggttgttattccctatccgcgttgcgccgccaatgtccgtagcccggttgatggtggcgttttcacggaagacgttgttatcccccacttccagataagtcggctctcccttgtatttcaaatcctggcttttcaggccgatgacggaaaacgggaaaaattcgttgccgctgccgaaggaagaaggaccgtctataaccacatggctgtgcagcacgcagccgggccccagtttgacatgttccccgacaacgcaaaaggaatggattttaacatcatccgcgatctctgcagcaggatgcactactgccgttgggtgtatttctggcatggctgaaacaagtatgaaacaaattcaggtgattaaaagcctaaaccccgcagggccgtctttttatcacatttggccggaagcggccgcataagcctccatctcaggcagccagggaatcagcagaacgtagatgagttgaaggcacagaatgatcagcaccaacgtcatcaccactttgcggaacgtgagggagccgttcagcacatccgtagtccccagcttcctgtcccagggagtaaaaccgaaacggcgcacccaccaccaggaaaaaaacagggccagcagcatcagggaaggagcaaaacaccccagaccaagcaccatgacgaacaaggagcgccggaatgccatggggaaagaaaagcgtcttccccggtagtccctgacggaaacgcccagcatggcttttcccggggttgtgcccaatgttccaagaaatgcagtttccatgagaaccatcgggaggcagaggtaaagcagagcttcataggaaccaggaagaaaaccgggattgaaagcagcgccggataccctgagcacagccaagtacagcgtcatgtgcatcattacatcagccattctgccaagaaaacggacgtacgcatacggaaccaccagcggcactccctcctctgcgtcctcccctccttcttccggcaggcaatccgcatctgcggaaagcgccgggacatcttctacccctgcgttttccagcctctcttccctcccgttccgccgttccccttcttctctgctgacggcacctgctcctttcaatgccggaaggtcacggatgcatacccactccgggcatccggcatgccacgcccgggcgttttccggaatgaggcccgcctccaacatggaaatgacctccacttccggcagaggccctttccgttcatgatcctgaatccagtaaatatccataggcgattcctgttacatactgcgcagggagcgggccggatcctggcgcgccgtgatcagggcaggaatgatggatgccaccacgaccatgacaaaagctttcaccgcctgccatgccagctccgcccagtcaatcaccaccgggatattcgccgtgccgtggaaggacacagggaacgggtcaaagcctattcccgcaagaaaaccctgaatctgcatgcggtattccagcaccagaagccccagccctacacccaggagagctcccacaaaaccgatgatgacgccctgccacaggaaaacgcgtaccacctggaacggcgtggctcccaaagccttcatcacggcgatttcctttttcctctggatggaaacggtaaacatcaccgccatgatgcaaaaagcggaaatcagggagatgaaggacaggacaaagctcatcatcatgcgctccttctgcatcagttcaaaccacgcgttaaagcggtcatgccaggtttccagcgtccatgcggaagaaggcttttccttttccagcgcctgcatcacgggggccagcatcgtttccacatggtaagggtcttccacgcgcagggccacggcctgcactacgtcatcctcataacccagcaattcctggccgatgaccagcggaatgaaaagatccgggctgggcgtatgctgggaggcccggtaaattccgatcacctccaggtctttcggcatcaccagctccttgattttccggaagcattccatatccgcctcatttcttgccccggccttgaaaccgctcaaaacggtttcccattccttccgcgttccttgcggaaaggccaccctgccgttgtccgcaatttccccgtcgttcagcacggcaagcagatccatcaggctggaacgttccgcatccctgcgcgggacggacaacagcccgttaagcagggaaaacgccctgtccacggaggctctgccggccatttcacgctctccctccgtcttcaggttctttccccactccttcaaatccttgagttcccgcgcgtttttttccgccagcatcggcagttccgtctgctggtaggcgtgggaaatttcctgaaaattgcgggtcgtataaacccggacaacatctcccacattcaatcccatgttctccgccacgatggaggaaaccacagccttttcccccatgtccagttccgcatcgccagctaccaccaaacgcttcaaatcctccagctgggcggcgttttccgtatcaatggcccggaaaaagcagggcctctgccgcccctgcacatccaccagcgcatagtcttctatcagggcgtaggtggactggacgccgggaacgtgcctgagtttctcccccaaatccatccagtccggaatcacttccctcacgccgaagtcgttccggtagcatacctggacgtgcggggagtgcgcaaacaaattcccctgaatttccttctggaggcctcccatgacggacagcacgacaatgagcaccattacccccagagatacgcccagcaggcaaatcagggtaataatggaaaagaaagtccgcaacgggttcaaataccgcagcgccagactcaggctgatgtaccggctcaataggttcttcatgaataacgcggcacaccttgcctgatcccgctcccctttccaagcctaaaacatgttccggggaaggagatcgtttacctgcctccggcaccctgccattccaggcacagccagcgggccatggaggcgatcacccggtcacaagcggattcagaatcctttgaatccctgatgaacacggaaaccgccattttccggccgttgggaagaacaatgatgccgacgtcattgcgggcggtaacgccaccccccggcagcgtgaatccggatcccgtcttatgcgccaccacgtaatcccgcggcagctgccctttcagacgttcaggacctgtagaacatcccgccatgatgttccaaagaacactctgtgtgccttttttcaaaattttaccttcgtcaaacgcccggagcagggagttcatggccgacggacggcttgagttgacatattgcaaatcatgattccggtgtatttcttcttccgtaaaacggacattaatgccgtcaattccccattccttcaaatccttctgcacggcctgcggccctccaataaggccaaacaggaggtcgcaggtgttgttgtcgctttcctgaacagtcactctcagcagttccttcagagagaaatcgccgccttgcgggaaacgctcccggagggggctccaggtatctttcaccagttgttccggacgtatgcggatgatctgttccagattcatggcgccctggtccacccgcttcaagacagacaaggccagcacgaatttgacgacgctctgcatgggataggccgcctcatcccccaccatgacggtttcccccgtatccagcatttccgcagccatgcccacacgggccttcagggaatgggccagctcgcgtacggcggaggaatccgctgcggaaacggctggcggagaagacgtggccccctgagaaaaaacgcaaaagaacatgatgcaaccgcatagataaacaccggtggaagtcataggcgccattccataccacgcccgcaacaaccgcaataataatttctcccccttttttcctttcttcgtcatccgcaagccgggcagaaaccttgccacctgtccggcttcctgataagaaggaaagcatgccccatctcctttcggaaaccctcgtctggtgcgtcaccctgctgttattcggcatggggctgatcggcacgctcatccccatgcttcccggaattatcatcattgcggccgggtgcgtctggcagggagtcatgggcagagaaaacctggcgtggtgggaatggaccgtcctggcgctgctggtggcgggaggcatggtcattgacaagctttccggaggcatgggcgccaaaaaattcggcagcactgccgccggcatctggggagccatcatcggcgccgtggcggggagcctccttttctcccccatcgtaggccttttgttcatgccgttcctgggggcgctgctggcggaacttatctttgccagaaaggatatcatggacgccttcagggccggttccggagcggcgcttgggatgcttgccggcctgctgctggaatttacctgcggcctgctcatcatcgcctggttctgttcctgctgtttcctgttttaatgtcaaaaaaaaccgtaaccgtaccctgcggaagccttcggcaggaacaacggagtttctccgttgctgaaagaaacacagtttccccaacgtattccgcaaaacgccgccccgcatgcccgcccggtcgaacgaccaggttctcccattccctcattttaccagcttatggatgcacctgttccgatacccgtcgccatgatggcaggtttcatgattcttggagccattctttccatggggaaatgttcctttctcatcgcaggctgcaacatgatgaacagagggcagaaaaagcagtatgatgaacaggcgctgtgccggttcatggggaagatcatgtactgcctcgccttcgccatgctgctctggctcgccagcatcattctccagaactccgtgctcctgtccgcctccctgtactttctggtgggaagcattgcatttgcagtcatttacgccggcaccggaagacgatttaaaaaatagcgttttttacaccagctttcttttacttttattatacgcaacattatcttctcccatgaacgtccctgcaaccttgaaacattccttcctgctctgccttttcgcggcagccgtcccactccgggccattccggcccccatgcaggtcaccgccgccacccccgcccgggtatggacggaaggatacggcacgggcaacggaaggctgggcatcctctctttcggcgtttttccgaaggaaaccgtcgtcctcaatgaaggaagtattttcgcaaagaaaaatttccaaatgagggaaggcgccgcggaagctctggacaaggcgcgcgaactttgcaaggaaggaaaataccgcagtgcggatcagctattccgtaagaatatccttccccccggcaacattgcgggggattaccagcagggggggcgtcttcaggtggaattccaggggcttccctcaccttcctcctatcagcgtacgctggatatgcggcggggcaaggcaaccacccgcgcccaattcggcacgggggaattgaccacagaaatcctggcggccccgtccagcgactgcgccgcctaccacattgcctgcacaatgccgtccggatgccgcgtttccctgaatctggaacacccggatccggcttcccgaattgttgcgcagccgaatggctgggcactggaaggacagggaagcaacggaggcacccggtttgaaaatacggtggccattctggctcccggagcctccattactcgcaaaggctcaacaattattcttgattccgcccgggaagtgctggtgctttcatccatttccacagattacaatatccggaagccggaaactcccctgacgcattccctgacggctaaaaacgcgcgaatcctggcaaaagcgcaaaaggcgggatggaaaaaactggcggcggaaacggaagattatttttcccggctcatgacgcgctgccaggtggatctgggagattccccggccggggtctccgccatgaccaccgcccaaaggctggagcgggtcaaacagggaaagaaggatccggatcttctggaacagcttttccagttcggccgcttctgcacgattgtccacaccaggccggggcagcttccctgcggtttacaggggttatggaatccggagttgagggcggcgtggatgggctgttatttcctgaacatcaacagccagatgaaccagtggccctcccatgtcaccgggctgggagaattccagaactcctatcttgattttgtccgcagcctgcgcccccacggagagaaattcgcgcgcttcatcaagcgggacggcttctgcttcggccactatacggattgctggaaacgcacctatttttcaggcaacaatccggaatggggggccagcctcatgaacggggcgtgggcgtgcgcccacctggtggacagctaccgcttcaccggagacagggaagaccttaaaaaatcgctgcccattctggaatccaacgcgcgattcatcatgtcctggtttgaggatgacggcgagggccgttacctttccggcccgggggtgtctccggagaccggattttacgcgccggacggaacaggccccaacgtgctttcctatgtttccaacggcgcttcccatgaccagcttctgggcagggaatccctccgcaattacatttacgcctgcggggagctgggcgtacaaacgcctactctgcttaaagccgtccaatttctcaggaaaattccccagccagccatcggccccgacggaagggtgcaggaatggaggcagccttttgaagaaatgcagaagggccaccggcacatcagccacctttacggcctgttccccggcacggaatgggatgttctcaatactccggaatacgcagaggctgtgcgcaagtcagccgatttccggcgcaagtacgcggatatgggaaacaacggcatcaggaccggatggagcacggcgtggctcatcaatctttacgccgcccttggcgacgggaacgccgcagaggacaggatgtacaccatgctgaggcactacatcaactccaacctttttgacctccatcccccgttccagatagaagggaacttcggcttttcctccggcgtggccgaatgcctgatccagagccggatcatgcaggacgggttccaggttatcctgctggctccggccctggcagacgactggaagaaggggtcagccacgggattgcgcacgcggggagggcttaaagtggacttgtcctggcaaaacggccgggtgcaggccacggctaccgctgcgcgtccgggcaaattccggttcatgcatcagggccggaaaaaggatttgtccatgaataagggagaaatggtgcgtcttgattttcctccgctttcccattaggactcccctttctgcgttacctcttcaatttccgctatgcatttctttttcatgactttcaggctcggtctgctcatagtggtggtctgcatcgccctcagctcctgttccaagcttttttctccccgcggaagcggagaaataccggacacggaccaaacggaaacgctcctgaaagcgcatgtattccacctggcggataccatcggtgaacggaacgtctaccaccccggctccatggagcgttccgcccgctacattgaacaaaaactggagggaatgggttatgccgtcacgcgccaggctgttcatatcccgccctccggagaattcggctccgtcaaggactggacggcatataatctcatcgccatcaagaaaggaacctccccccggcccaaaatgctcatcgtcggcgcgcattacgataccaaagtgggcatggacaactggcacgaccacggtcctgcccggccttcccgcaccggaactccgggagccaatgacaacgcttccggcgtagccgccctgctggaaacggcacgtgcccttgcagcaacttccaccctccacgatgtttgtctggtggcctacgccaatgaagagcctcctttttaccagacgcccgccatgggcagcgcagtgcatgccaaatccgtctcccatcattcgggcagggaaaaaatcatcggcatgattgccctggaaacgctgggctgctattccccccgggtgaataaaaaacgccaatccgccgtggttgccggattggccggcctgccggaccgctgcgactatgttgctttcctctccaccaacacgggccgcaaactggcacgctcctgcgcggaggaattttccgccttgagccgctttccggtgcgttccgccgtgttcccgtattacacccgcggcgtttcctggtctgacgactggggatacatgaaggaaggcatcccctcctttgccgccacggatacggccttcctccgctgcgacgattaccatgaaaccagcgatacggctgaaaagctggactatccccagtttgcagaagtggtgcagggcctttccaaactcgtcatttcactggccaacaaaccatgaacaaagaaacagatattattctccgcgctttttctgacattcgcctgcgcttcagccggggccgttccgcctgagccgtccgcgctgagcgccttctgccctccctcagagggaaaagcctttcactccgaatggatttccctggggctcaaagcggcggatctgaaagaaaaacaagcctccgccggacacattacggacgtaggagaagcgcaaatccagcttcactttcccgccggatggagtccgcaggacaagcgcacggccctgtgtatttttccgggaggggggtatgccatccaggccattgaaaaggaagggagccgcattgccggctgggcggcggaacacgacatggtgggggttgtcgtgaaataccgcgtttcaggaaccggcaatgccctggggaagtttcccggtcccctgctggacgcccgccaggctctgaggaccgtgcggaaaaacgcctcttccctgggaattgaccctcttcgcatcggcgtcatgggcttttccgctggcggccatctggcggccatggcctctacgctgtggaaccgcaccctgccggaagaagcggaaaatccgctgaaaaacatttccgcccgtccggatttttccatgtttatttatcccgtcattaccatggcgccccatactacccacgggggaacgcgcaacaaaatattgggggcccatccatcccctgccctggaggagatgtgttccgcggagagacaggtgacggagcaggcgccgccggtgttcctcgtccacgctctggatgacggcgtttcctgcgccaacagcaggctgatggaacaggcttgccgggaaaagggggttcccgccagtctgaacttctatcccacgggaggccacgggtatggcatggaaaaacgcggacatcccacggatcaatggcctgaagccgccgaacaatggctcagggaacagggattcctttcttccccgtcttctgcccgcgggggtgcgccctccggagcggacacttcctccggaacacgacgggaatgaatgtgctaggaccggcgtgtgccgcaccgcagggttgaccggaaccgggcccggtggtactttttccgggcatgagtgcgcccgaaaagaattacaaagacaccatcctgttgccggagaccggtttccccatgagaggggatctgacgaaaaacgaacccgtacgcctgaaaaagtgggaagacaccgggctgtacgaacgaattttgtcccgcaggatggcacagggcgcaccccggttcctccttcatgacggcccccccttcgccaacggggacgtgcacatgggtacggccctgaacaaaattctcaagggcctggtcctgaaatcaaaaaccatggccggttatgccgccccctatattccgggctgggactgccacggcctccccatcgaattcaaggtggttcagaaggcccgtgacctggatgcggcggaaatccgccgacgctgtgcggaattcgccaaaggcttcattgacattcagcgcacttccttccgccgcctgggcgtgttcggcgactgggagaatccctacctgaccatgaagccggcgtatgaggccaacatcctgcgcgtgttcgccaaactggtggaagacggagcggtgtaccagagccgcaaacccgtccagtggtcctatggggcctatacggcgctggcggaagcggaaatcgactacaaggaaaaggtcagttcctccgttttcgtgcgcttcccgcttctggacaatcccctgggcctgaaagcatccatggtcatctggaccactactccgtggacgctgcccgccaacgtaggtctcgcactccatccgcgtttcacctacgtggcaggcaggttcatgaaagacagccagacggaaaacctcatcatcgtcaaggagttgctggatgccttcgctcagaaaacgggctgggctcttgcggaaaccattcgtgaattcaagggagccgaactggaaaactgcgaggcccgccatcccttcctttcccgcacgtcaacaatcatcctggcggactttgtcaccacggacaccggaaccggcatcgtccacatcgcgcccggccacggcgcggacgactataacgtgggacgccaatacggactgcccgtcctctcccccgtggacgacgacggcaaatacacggaagaagtgggcgtgccctccctggtgggcaaacatgtctttgacgccaacaaggacatcatttccatgctggaacagggcaacaacctcttcggcgtggaagaataccgccaccagtatccgcactgctggcgttccaagacgcctattattttccgggccgtggaacagtttttcatctccatggacaagctccgcccgcaggccctggaagaaatagacaaggtgcagtggctgccctcctggggccgcaaccgcatttacggcacggtggaagccaggccggactggtgcatctcccgccagcgcacctggggcgtgccgctgcccgtcttctttgacgaaaacggcaaagccgtcctggacgccgctctggttcgcaaaatcgcggatatggtggagaaacacggttccaacatctggtttgaactctccgatgaagacctgtgcgaacgcctcggcttgccgaagacctggaaaaagggcaaggatacgctggacgtctggattgattccggcagttcccatatggccgtcatggacaaccgccccgggctggacgcgccggcggacctttacctggaagctacggaccagcaccgcggctggttccagagttccctgatgctttccgtcgcctggcgcggcaaggctccgtacaaggccgtaatgacccacggcttcgtcgtggacaaggacaccgggaaaaaaacctccaaatccgacgccaagagcggcaaacccattgacgcggcctattactacgacaaatacggcgcagacatcgtgcgcctgtgggccgcctctgtggactggcaaaatgaagtccccttcggggaagacctcttcaagcaggtgacggaaccctaccgccgcctccgcaacaccctgcgcatcctgctgggcaacatcagcggattcgatttcgccgcgcaggcagtcgccccggaacacatgcccctcctggaccgctggattctggaacgcctgaacgccgtcatcagggaaacgctgaaggcctatgaagcctatgacttccgcaaggcgttcagcgccatcaaccagttctgcaccagcgacctgtccgccctgtacgtggacaccaccaaggaccgcctgtactgcgactcatcttcctccgtgcgccgccgcgccacacaaacggccatgaccatcatcttcaaggctctgtgccgtctgctggctcccatcctggccttcacggcggatgaagcctgggaatacgcgggatatgaaggcagcgtgcatgagcaggacttccccgcccccatgccggaatatgatacccaggaggcgacctccgttatttcccgtctccaggaaatcaggtccgtcattcaggtagccattgaagaacaggtgaaagccaaggtgttttccaaaaataatgaggcatccattaccctgaccgttcccgtgaatgagagcgaagacgtcgtggcgcttctggaagaccgggcgtttgccacggaattcttcatcatcgcggaccttgacgtgaaaaccggtccggaactggcagcctccgccgcaaaaacagaacatgccatgtgcccgcgctgccgccggtatgaaccggcggcggaaggcggggacgtatgcgaacgctgcgcggaagttctttcctgaaccgcatccactccattttccgacctttatatgaatccccagacggaaaaagaacccgccccccataaaaagacgccccccggctggctctggtggagcttgctgggcgcagggctgtatgcgctggaccaggccagcaagctgtggattatccgccgcttcccgctgaactacctgaacgaaaagctccataagtacgcctatctgccggactttccgggcttccagcacatcaatgcggacggcacgctggacttcgccacgaacggacgcatgccggaggcggaactggcgcggctcccggacctgaatccaaacacggtggacgccctgaacaaactgagggaactggaacccatttccttcctggacggaaccatgaacattacccgcgtgcacaacacgggcgttgctttcgggctggggaacggcaccgtctggtccagctatctttttctggcagttcccgtgctcgccatcgtggtcctggtcgtgctttaccggaaaaacttcttccacacggcatggctcaagctggcctatgtcctgctgctggcgggcgtagccggcaacctgacggaccgcctgattcagggcttcctgattccgtatgagcagcagcacggtttcttcaccaagctgatgaacggttacgtggtggacttcattgacgtcaccatccccctcttcaactaccgctggcccgccttcaatgtggcggactcctgcatcttcgtagcggcaattattttcttcatcgccagcattttctccgccaggaataaagaagaaaaaacatcctgaaacgcccatgaccacccggctcgttattctgtcaggactgcttttgtgcgggagcctcgcctccggcaaaaatgaattgtccttcaaggaaacggtggttccggtaaaggtggctccggaccaggacagcatcacggcatccttctccttcaccaacacttccggcaccccggtcaccatcagtaaaatccacgtttcctgcgactgcaccaccgccggagcgaaggataacaagctgacgtatgccccgggggaatccggcgtcatcagcgccgtaatgaaaaccggcaacttttccggcaccgtggacaaggacatgacggtgtacgccaacggctccgcctacaagctggtcatacgcgcgcagatcccggacatcatccggatggaaccccgcaagctggaatgggccagaggagaggccgccgcgcccaaaaccataaaaatcaccatctccaaagaactgcccgtcaacctgaccacggtggatttgacgggagacgcctttgactacgagcctgtgaccgtgaaaaaaggcagggaatataaaatcatcgtcactcccaaatccacggccaggccggccttcaacaccatctgggtgcgcacggattccgccgtgccgcgctacaaacgccaaatggggttcctggccatcaaggaaaactgacatccgcccttccttccatgagagacgccttttcctccgctctgaaactcctgctggccgtatttctgctggccgtaggcgtcgccgcgctggatctgcgcgtcatccagccgttccgcacgccgccctgcaacccggaaactctggaggaagggcacgtgtgcctctcccaggtattaaaggaatggccgggaaaaatcctctggatagatgccagaaagcaggacgactttgaacgccataccgtcacccgggcccccgtttaccccatccgtccggcggatgccaattaccaggaactcctggcgaatgccatggaagccctgatgacggcagaggacaggggattctgcatcgtcatcttttgcagcagggactgcacctccagcgcggccgtggccaatgaactgaaaaagccggaatacggcatccgcgcgcccattttcattctggaaggaggctgggatgaattgcgcaaagaaccctcactagtaccatagccatgcttgacacagcaaccattcgcccgcagttccccattctggaaaccagcgtgcacggcaagcctctcatttacctggataatgcggccactacgcaaaaacccctggccgtgctggacgccatccgccattactacgatacggaaaacgccaatgtgcaccgcggctcccactacctgagccagctcgcgacggaagcgcatgaagaatcgcgggaaacggtggcgcggttcatcaacgcgccggaaacggcggaagtcctgttcacttccggctgcacgatgggcatcaacctggcggcggataccatcgccgcgtccggcatggtcaaaccgggagacgaagtcatcgtaaccgcttccgaacaccattccaatatcgttccctggcaaatgctgtgcgaacgcacgggcgccgtcttgaaagcggttcccctgacgccgggccagactctggacatggaagcttaccggaacatgctttccccacgcacccgcatcgtagccgtgggacacgtttccaatacgctgggaacggttaatcccgtgagggaaatggccgcgctcgccaaggagaacaggcaggaaaccatcgtgctgattgacggagcccaggctgtttcccacatgaatgtggacgttcaggaactgggctgcgacctgtacgccttttccggccacaagctgtacgcgcccaccggcatcggcgcgctgtggggaaaaagggagctgctggagaaactgccgccgtggatgggcggtggggaaatgatcaaggaagtcacctttgaaaaaaccgtttacaacgacatccctttcaaatatgaagcgggaacgcccaacattggcggggcagtgggtctggcggccgccatccgctacgtctccgggctgggcctggacaacattgccgcccatgaacagaaactgacggatatggcggtggaaggcctgaaggccatgccgcgcctgaccgtactggccccggacgtgccgcacagcgccgtggtctccgtcctggcggggggcatccaccactatgacctgggtacgttgctggaccagatggggattgccgtaagaaccgggcaccattgctgccagccgctcatgtgcgccctgggcaccaccgggactacccgcgcctcctttgccctgtacaatacggaagaggaagtgcagaccttcctcaaatccatgaaccgggcgctggacatgctctcctgaataaccctcccttccctgcttatttacaccgcgcatcatgaaaacggtttccatccttctcttaggactggccataagcctttccggctgttccctgcaccagcggcaggaaatggagtacgcccattaccaggatgacgccgcggctatccgggaggcctatgccgcatggctcattctttcctctcccaaccgcagccgggaatggccggaagcccggaaaaaatacaatgcgtgcattcgggagctggccgcccacctgaaggaagccaaacgcaaaggcggcatggatgaggagaagcgcctaagccttcccttcgtcattgaaaaatctccctatgccagggacagcaatccgtggttctatgaggccattttcatgtccgatgaagtggatcccaccttccgcctgcgcgaaagcgtgacggtagagggaatgggcataccgctggcggggctggcgccccggggcggttcccgcccccatgccaacgtgcttaaggacaacggcaacgtgcacacgctgacggccattctggactttgaccgcatggtggacgggaaaccaaccctccgcaccattccgcgcctgatgaatgagcacatcttcattggcaaaaataaggtgcggcagcctctggcggccaatttttccgtccccatcgctctcttctggaagctttccgacgcagacggaacggaactgctgggggcattccgccccaaaaaggccatcaatacgatggggctttatttttccgaaccctatgacccccggaaaatacccgtggttttcacccacggcctgatgtccggccccgccaccttcgctaacctgaccaaccgtctcctggtggatccggtcatccgggaaaactaccaattctggttcttcggctatccgtccgggctggcctggaccattccggccagcaggcagcggcaggccctgaaggagctcatgcaggaatacaatccccgcggaacatccagggaaatgaacaacatcgtcatggtgggacactccatgggcggcctcatcacccgcttcaataactccaccaaaccctggacgctgatgaagggagtatttgagctttctccggaaacgtttgagggaatgacgctggaaaactggaagaaaggaatggcccccctccattatgatgaacaaacgcttgaacggctccagaataatttcatcttttccccgccccagggagtcacgcgcatcgtgtacatggccaccccgcaccgcggttccactttcgcggacaactggataggaaggctgggccagcgcctgatcgacctcccctcggacatgctggaagaagtcacccgcatcgccactctcagccgcggcatgttcctactcaaccccctgcaactgaaggacgagctgaccagcatccgccagctttccccgaattcatccctggtcaaatacatgtcggagctgcgcggctccccaaatgttcccgttcattccatcattggagacaggggcaggaacgacactcccaattcctccgacggagtggtcaagtaccactcatcccacctggactggagcgccagtgaaaaaatcgttccgtccgggcacagcgtgcaggatgacccggcctccgccttggaactgcggcgcatcctccgggaacacctggtcaaggtcaaaggccgtaaaacgctcgaagaagcggacgcgaaagccgccactcccgtatggcaggccaatccctcgccgcctatcatcctgaaaaggccctgatgcaggggactgtttctccttgtccatacaaggcctccttcccttcccccttctgctgttcctgctgatagcggcagccatcttccagtcaaacggccacgcctcggcgctcctgtttccgggttcctgtatgtcccagctttaacggctggagcaacctcgttcatccgccctccctgccgcttccggaaaaaacaggaaccggacaggatttaccttgccgcgggcatctgcggcaacatgccgccgccgcggttggaacaactgaaattttccctgctcatcacggcctgttcctggctgccctgatttgactggccggttatggaaaagggtgcgctccatccgggcatgattggcgtccgttcagcatcagggcgtcccgccatcaaaatatgcccgcttatagagttgcttccgtaggggaatttaaggtagagtgggaatcaatactattccacctctcttttccatgtctgccgacgattcctttcccatggatcagatttcctctctctttccccaattggaaaatatccagcttgtcggagccaaaggcccccagcaaattttcacagctaccctgaaatcaaactttgctcccgttatgctgcgggtggttcccacggaagaagccggcatcttcggctgggatcctgaattcatcgtccgctccctcaccatcgtggaacaatcccaccaggggctcctgcgcgtttatgaagtaggacaggcggggccgtttactttcatcatctccgaacactccccctatccgcgtctggcggatatggaaacccttccccaaatatctccccaggcggcgctcaacctggtgcgcaacatggcggaaggactgctgacgctgcaccggaaaaacatttttcacgggggcatcacgcccaagctgatttgcctgcgcgaagacggcggagacgccctgctgctgcccatcaacatttatccagcccaacctccggtggacatgggggacttcgcctctccggagtgggtcaccggagcggaaaccacgttcacgccgggcatggatatttacgcactggggctggcgctttacattctgcttacccgcaaaacgccgatggaagcgggctttgccatgccctcctcactaatcaaatgcagcgatgccgtggattcggcagtctcccgcgccatcaatccggatacccgggaacgctaccgggacctgggggatttcatcacggatatggataaagccattgccaatcctgcgggaagaaatgcggcctccatccctccgccgccatcttccccggccatcccggccctgaacgtgcaaaaagggcagtccaacatctattactatctcattccggccctgatcgtgggcattgtgctgacctatacctgcatcctgtataagaaggatgtcgttagaatgcgcaatgattataatgaacaggtgcagaaggaaaataacgcgaaagcggaagcggcaagacaagcgaacagggacgcgcgccgccacgctccggccaccgcgcaaaacgccgctgcggccattccttcacctgttccggccgcgcgtccggcgcaggcgccgacagttcccaaagtttccgcggaacccggcaaagtcaattggagccttcaacccggcgtcaaggttcgccagagttccaaccgcaacatgctgggagcttacggtccggaaaaggccgttgacggcaataccagctccaggatttccgacgtttcaatcagcgccacaggcgtggttgagggaaaaaccgcctggttcggcattgacttcggcagggagaccaaccgcaccatagaaaaggtggtcatttacacgccggccaacctgacgctgctgggcaccatggaaaaattcaaggtaatcctctacggcaatgacaaaaacgtgctggcggaaaaaaccttcagcaccactccttcggaaaaatccaccaacgtcacttcctggaaactggacgctccggtcaaggcgcgcgccctgcgcgtggaatccgcaaatccctcccagccgctggcgttgacggaagtggaagcgtacggaccggaagatgcggaggacccaccggtttccgcacctgcggagtaataattatccgcgcagccctgcacccgctcgcccccctccgggggccatgctgaaccctccgtttcctttccccctcccggaaagcaggttggggcagggcctgatggaatgtcacgcgctaagttcctggtttggcttcgcatatgaaattttccggtttctgctccattctccggaagccatccaggcccggacggaggaaaatccaaaaaacgtatttgctccggaccggaaacagccgcccctatccaccttccccaccccggaaaaacgctctcatccccatatggctcccggggaaatatcctgaagcgactgttgtccctgtggacctctttcccattcaggaaaaacaatactccggaaaataaaaaacccggcgccgcctcacggcgggccgggccagcaaaatagcaattcttccgattaccggttggcagacttcacaatcatggcatccttgccgatgcggccgcgcagatagtgaagtttggcgcggcggactttgccgcggttcacgacttcaatcttggcaatgcggggagtatgcagggggaatacgcgttccacgccttcaccgtaggaaattttgcggacggtgaaagcttcattgatgccggaaccgcgcttggcgatcacaatgccctggaaaatctgaatacgttccttgccgccttcaataacacgagtgtgaaccttgatggtatcacctacgttaaatggggtcacatccgccttgagttgctcttgctcgattttgttgataatgttcatcttgtgttatctattgctggtgaatatcagtaaaaggaaaacttacgggacgcagaatatgagccataatcccctaaaaggcaatccaaatttgccgtacgtccttaatttattttttcggcggggccggaggcggagccaccctggcaagccattcctccagcgccggaagaaaagcggaggaagacatgaggccccggatgccgtccgcccgctgcagaaaggccttgttgccgccccgggcccgttccgccatcaggatttccagcagcaggcgcgcgcgggtgcgggcgtcagccgcgccgtccagggcggaggaaaggagctctccggcgcggaccggttccttccggtacaggcattccagcgccagagcttcataaagacaggaaaaaggggccttccgggcggactccatcaaacgcgcggaacggtccttccagcggtctccgaactgcacggaggaagcccaccacccctggaaataacggtcttcttccgtcggctccacgtccatatccttcatgcgggcgtatggacggtacagggggtctccgaacaccaccccctgccaggacagcacaggcatgctcatccaggaagcctccgccacggtatagccgtccaggaggcggtgcacaaaaatatcaaagcggtggcaggcgcccaggaacggctcatacacgtttcccaccgtcacagcagcccccttctccagcagggcggaactccaccccctgccggggaccttgaaatcggcggcgctgaaggaatgcagatgcatggctatcgccccgggccggaaacggaacgaaggatccgaaaacggtccgttcgcattccccgcataccacccacagtaaagagccgtatcccggctcaaggggaatttttccggcaaggtctggggccagtcatccagataagcgggaatgcccgcctccctcacgcgctcgaacacgtcgtccagccaccggtccccctgggcatagggaccgccccggtccacaacggcccacccccataaaccttttttctccacgttcgccggttccgtcaccagccgcatgcaggtatcgggcgtcagtccgtccaagcggcataccagaaacgaaggaaggccggaacccacaaaatcctcccttttattaaaatagggattcacctgccaggacttcctttcataaccgcccaccgccagcagagccaattcggaatccaccgcagcgcgatccgtctgcatctggttgacgcctttcccgggaaggagagcgggcgtttcatgccgtatcttcatcggcaggtccgccatcagcaccagcacaaaaatcttccggttcatcaagggggaggacgcaatgccggaaggcacccaccaccgttgtttccgcgccgtctccagcagcgggacgcggatcgtatcctcatattccttccgcgaaatctcgctggtcatggggcaatccagggaaacgagattcccttccggaacgccgcgcacccgcgcatactccctggccatgcggcggctcagctcggattttccgttataaatcacggccacatgagcgggcagcagctcataggcacacgcggcggaaaaccacgacgccagcagaaataacacggctaatccactcttgaacatgcccctaccatacctcatcttccggggcaatcaagcaggtgaaaggggcggccacgaattcgccatttttccgcttttcgcttcacatcctaaaaaaatacgctttaataactcttgatgtattgcaggcctcccccctgcattccctataaccatcacacgcatatgattcagcaaattgaccatatcggcatcgccgtcaagagtcttgacgccaccgtcccctattaccgcgatgcgctcgggctcggagagccccacattgaggaagttcccactcaaaaggtccgcgtcgccatgtttgacgttgccggagtccacatcgaactgctcgaacccacctctccggaaagcgctatcgccaaggctattgagaaaaaaggggaaggcatccaccacatcgctttcaagaccaatgacatcgccggaaatatctcccaggccaaggaagcaggccttaccgtgctgaacgacccgcccgtccccggcgctcacaacacgcaggtcaccttcctgcatcccaagtgcaccttcggcgtcctgaccgaattctgccagcaccccggcagctgcgaatgcggcaagtaacattctccctattcaccataccactagaccaatggctattgatcccaaattgattgacgatctgaacagccgccgcaagaaggtcatcctcagcggcggtcaggaaaagatcgacaagagacatgaaaagggcgaaatgacagcccgcgaccgcatggggtacctctttgaggaaggcaccttctcggaaatcggcatgcatgtgcgccacaactgccacaacttcggcatgggtaagaaggaaatccccggcgacggcgtcgtttccggtttcggcctggtggacggccgcccggtagcctgcgcggcctccgatttcctggcccagggcggttccctcggctacatgcacgccatgaaaattgcggatgctcagaagtatgctctgaaagccggcatcccgatggtgaccgtgaacgactccggcggtgcgcgcctccaggaaggagtggcggccctttccggatacgcccaggtgttttacaacaatgtgcttgcctccggcgtggttccgcaaatctccatgatcctgggcccctgcgcgggcggcgcggcctactcccccgccctgacggacttcatcatcatgcgcaattccggcaacgcgggcatgtacatcaccggtcccaaagtgattgaacaggtcacgtatgaaaaatgcacgatggacgacatcggctccgccgccattcacgccaccgtgtccggcaacgtccatttcgtagcggacagcgacgcgcacgccatggacatcctgaagaggcttctttccttccttccttccaacaacacggaagaaccgccccacaaactggacactccgctggacctgagcgctgacgaaggcatgagcgacctgattcccggcgacaaccgcacgccgctggacgtccagcccatcatcagccgtctggtggacaacggggacttcctggaagtacacaaggacttcgccaaaaatgtcgtcgtcggattcggccgcatctgcggcgtggtggtcggcatcatcgccaaccagcccaatgtgaaagccggctgcctggatatcgattcctccgacaaggccgcgcgcttcatccgcttctgcaacgcgttcaatattccgttggtgaacctggtggacgtacccggcttcctgcccggcaagaaccaggaacggggcggcattatccgccacggcgccaaacttatcttcgcctattcccaggccacggtgcccaaagtcaccctgatcatgcggaaagcctacggcggcgcctacatcgccatgtgctgcaaggacctgggtgctgacgccgtcttcgcctggcctggtgcggaaattgccgttatgggcgcggaaggcgccgtcccggtactctacggccgcgaactgaaggctgtggaagacccggcggaaaaagccaagcgccagggcgaacttctggaagaataccgggaagccttttacaacccgtatgtggcggccggcatgggacagattacggaagtcatcaatccggaagaaacccgcgccaaaatcgccttcgcactgcgcaccctgctgaacaagaaggaagtgcgcccggccaagaaacacggcaacattccgctctaacatccatcccaacggattcatatgttacttacaacactcgcttttgccttcgcacagggcatcgccaacgttatggacaatctgaattatcaggttgtcggcatcatggtggttatgctgtgcctgggaggcatggccgtcattctgaccgtcagcggctccatcgccgccgccattcagaacagggccaaagccaaaacagccgctcccgtagccgtgcctgccgccgctcccgctgcggcgggcaaaccgggcatgactccggaaatgctcgccatcctttccgccgccgtggattccgccatgacggagcttacgccggaaatggtggccgtcatctccgccgccgtggacgcaggcctagacggcatgagccaccgcatcgtggaaatcaagcaatccccgggttccggctatgcggccgcgggcagggcggaaattttcgcctcccaccgcatccggccttcccgctgaactactgcattattcacccttaccccgcccaggcggaaccatttaacttaatatcccataccacacactattatgaagaaacttcgcatcaccgtagacggcaaagtatttgacgtatccgtagaacttctggaccaggtgtcctccaccactgcggcgccggcccccgcacctgtggccgctcccgctcctgcggcttccgcacccgtggccgctccggtcccggctcccgcacctgctccggctccggctgccgccggcgcaggagacgttcccagcccgcttgccgggaaggtcgtatccctggacgtggcagcaggcacccccgtgaaggccggtgaccagattctgacgctggaagccatgaagatgaacaccatcatctacgctcccgcctccggcacgctcaccgctttctgcgtgaacccgggcgacacggttcaggaaggacaggcactggccaaaattggttaatcccggcggcggcagcccggaaacgccaacagtcccgggctccggctcagataataaaccgctacaaaaatattccctatgagtctttttgattcattaatcacctttttacaggggatgggcgtcttctccctatcatggcagatggtagggatgtggggcattgccattctcctcctgtatctgggtgtagccaagcaatacgaaccgctcctgatggttcccattgctttcggcgccctcattgccaacattccggataacggaatgctcatcacccagctgaaccagcaggtcatctcctccaatgaacagggggaagtaaccgccacgtctctgaacaacgtggggtacctgcgcgttcacgtggctccgcttcagcaggctccctccaaggtgccggccaacctgaccacgcctgaatcccgttcccagtatcaggaaatcatgcagcagcccatgcaggtttaccctggcagccagctgactgtttccaagatcaagtccgtgcgggaatcccaggaaaaagcaaaagctgacgcggcccgtctgggcgacgacagcctgacggtggactccaacctgaaggatttccagaacgtgacggaagacaacggcaatgaaccggtcttcctgctcacgaacggagaagggaccaccgtcgtccgccagcagggcgtcaattactttgacaccagcggcaaccggattccggtggatctgaaaacccagaagctggagcccctggtggtttcagccgcaggcaaatacgtggccgtaggccagcatacccaggaactgctggtcacctccatccacgggggcctgtatgactggatcgggctgggcatcaaggctgaaattttcccgcccatcatctttctgggcgtaggagccctgacggacttcggcccgctgcttgccgctccgcgcaccctgcttctgggcgcagcggcccaggtgggcgtagccgccacgttcttcatggccctgttcatggggttcaccccgaatgaatccgcgtccatcggcatcattggcggcgctgacggccccacctccatcttcctgacgatgaagctggccccgcacctgctgggcgccgtggccgtggccgcatacacgtacatgtccctggttccgctgatacagccgcccatcatggcgttgctgacgaccaagaaggaacgcctcatccgcatgaaatccctgcgaacggtcagcaagagcgaaaaactgtttttcgccgtgctggtaaccattgtcaccattttgctgattccggacgcatccccgctgatcggcatgctgatgcttggcaacttcctgcgcgaatgcaaggtgacggaacgcctggttcaggcctcccagaatgaaatcatcaacatcgtcaccatcttcctgggaacctccgtggggctcacgatgcagggcgaccgcttcctgcagtcggaaacgctgctgatcatccttctgggtatcgtcgccttcggcgtggcaacagcgggcggagtgattgccgccaagattatgaacctcatctggcgcaagaatccggtcaaccccctgatcgggtccgcaggcgtctccgccgtcccgatggcagcccgcgtctcccacaatgtgggccagaagtacgacccctccaactacctgctcatgcacgccatgggcccgaacgttgcaggcgtgatcggcaccgcagtcatcgcgggctactacatcgccactctggcgaaataaccagaattgaaaattactcccggcctcggcccgtcccatgaattccgcagcctcattttccacccctccggaggaggaaggaccatgcggcgactggacttatcatgaatgggccgaggctttttccaccaatgatctggcccgagccctccccccggggcatattgccgtctgccgcgttcagacaggaggccgcggcaggttcaaccgcaaatggataggggaggaaggcggcctgtgggcatccttcaccgtccccctgtccgctcctgaggatacagcggccggcgtgcactggggccatttgcccctggttgcggggctggccctgttcaacatgctccgcggcatggggctggattccgtgcgcctgcgctggccgaacgacctgctggcgggcaaatccaaactggcgggaatactggtggaacgcccagcggagaacatggccgtcatcggcatcggcatcaatgttttcaatgatgtatcctccatcgccggggaaatcaaggaccctccggcaaggctggcggatcttgttcgggactgcccttccctgcacgccgtcatggcttccctgggcagtcatttgaaccaggttctttccgtcttttcccacggcggcgtccccgcccttcaggaggatctgtcccgggcatgggccggagaaaggccggtttccattcttacggatgacgaaaccgtccggggcatttttacagggattgacgatcagggcaatcctgtgctatcccttccggccggcaccgtccgcaccattccggcgcacctgatcaacaggctcctcgaagaatgagcctgccgctccgtttttacacggggtttctttcttttttcatccaacaaaaatcactgacatgagttacaaggtactgacaccagaagaagcagcaagcctgatcaagcatggccaccatattgggctgagcggattcacgcccgccggaacggccaaggccgttacggctgcgctggcaaaaatcgcagaagcggaacatgagaaggggaaccctttccaggtgagcgtcttcaccggtgcttccactggcgattcctgcgacggaatcctttcccgggccaaggcaatccgctaccgcgctccctacaccaccaacgttgatttccgcaaggcggtgaacaacggggaaatcgcctataatgacatccatttgtcccagatggcccaggaagtgcgctacgggttcatgggcaacgtggacatcgccattattgaagcctgtgaagtcacggccgacggcaaaatttacctgacggccgcgggcgggatcgctcccaccatctgccgcctggcagacaaaattatcgtggaattaaacgccgcccacagcaagagcgccatgggcctgcacgacgtttacgaacccctggatcctccctaccgccgcgaaatctccatcttcaaacccagcgaccgaatcggcaagccgtacatccaggttgacccgaaaaagattgtgggcattgtggaaaccaactggccggatgaagcccgttccttcgccgcagcggatcccctgaccgataaaatcgggcagaacgtggccgatttcctggctgccgacatgaaacggggcatcattccctccacgttcctgcctctccagtccggcgtaggcaacatcgcaaacgcggtgctgggcgccctgggccgcgacaagacgattcccgcgttcgagatgtacacggaagtcatccagaattccgtcatcggcctgattcgggaaggccgcgtgaaattcggcagtgcctgctccctgaccgtgacgaacgactgcctggaaggcatttacagggatatggactttttccgcgacaaactggtgctccgtccctcggaaatatccaacagcccggaagttatccgccgtctcggcgtcatctccatcaacaccgccattgaagccgacatttacgggaacgtcaactccacgcacattggcggcacgaagatgatgaacggcatcggcgggtccggcgacttcacgcgcaacgcctacatctccattttcacctgcccgtccgttgccaaggacggcaagatcagcgccatcgtccccatggtttcccaccatgaccatacggaacatgacgtcaatatcattattaccgagcagggggtcgcggacctgcgcggcaagagcccgaaagaacgggcccagaccattattgaaaactgcgtccacccggattacaaaaacatcctctgggattacctgaagctgtccgacggcaaagcccagacaccgcaatccatcagggccgctttgggcatgcacgccgaactggccagaagcggagacatgaagaatgtcgactgggcccagtataagtaattccgcatgccgtcattcgcattggcatccatgaattcacgttaacctctcaggatcgcttccgcaaagggagcggtccttttcctttttcccatcccctctactccttctcttcaccatgaactggatgatttacccggcagccagggctttcatcaaagtctgcgccgttcttttcggcgcgggcgcagcagcggcagtcctcatccatctgttcatgccttttttcctccgctctccccggacagccgcacccttcctgcttttgggcacaggggcggaattgctctccatcctttccctgtccttcctcatgttctggggcgccagagtcctgctggcctcccgcggaagcagaataacaagaaatctgagcatgctggccttcctgcccgccctgtacgccctcctcattccgtttgcgggcatgcccgtcccatcgcaatatacggaaatggacagggtttgggaggccgtcctccttctggcggccgtcacttctttcttttccttcccttatacggcgggatacgaagccgcaggcaggagattattcctggcctggggcatcgcggcggcaggctgcggtttgcagagcgccctgttttttcttgccgtcctgttgcgtcagttcctgtccaccgcagttccctccctggcagcgcctgttgcatggctggccgttcttctgtcctgcggcctggaaatcatgctggcggccctttccgttcttctggcgcagcgcctatttaaagaggtcatgtccatagcatccatgccggaaccgattgatccctccatgccgggcaaccgtccctgactttccttccctccgtttttaccggcctgccggaagagtaccctcattccccggcatgaaaggcttttacggcttcgcgcaaaaagccgtccggaaatttccgccggtggaacggaatccgtatggaaagcaacccgccccaccccggaaagccgcagggtcgcagggacacccctcccgtttccataccggcggcagacaaccctatttcaccaattcatccagataacggccataaccgttattattcatggctccggcctgggagcgcagcatttcctgggaaatccagccgttattaaaggctatctcctccaggcaggctaccttgaacccctggtggtgctccagagtacgaacgaacatggaagcctccagaagggtatcgtgcgtgcccgtatccagccacgtatagccgcgcgccagtttttccacgcgcaacagaccctgcttcaggtattcctgattcacagaggtgatttccaactcgccgcgggaagacttgggaatccgtttggctatctccaccacccggttgtcgtaaaaatagaggcccgtcaccgcaatatccgatttgggcctgagcggtttttcctcaatggaaaccgccttcccctcctcattgaattccactaccccgaaacgctgcgggtcatgcacctggtaaccgaaaatggtcgctccgctcgtcagttcggcggccctcctcagcttctccgtcaggccgcgcccgtaaaaaatattgtcccccagcaccagggcaacggaatcctttcctatgaactcctctccaataataaaggcctgagccagcccctccggcctgggttgttccctgtattcaaaggaaacgccgaacctgctgccgtcccccagcaaatcccggtacagaggcagatcccggggcgtggaaataacaaggatttcccgtatcccggccagcatcagcacggagatgggataataaaccatcggcttatcgtaaacgggcagcaattgcttgctgacggaaagcgtgacgggatgcagccgcgtgccgcttcccccggccagaacaatacccttcatatcaaattcctagccattggttccaagacgttccaggcggtattccccggacaggatgccccgccaccattcctcatgatccagataccactgaatggtctttctgaatccggaagaatggtcctggcgcggagtccaccccaattccctccgtattttggaagcgtcaatcgcatagcgcaggtcatggcccggcctgtcctgcacaaaggagatttgctcccggtagctccggccgtccggacggggccgcagttcatccagatgggaacacagcagctccaccagctccagattggttttctcgttattgccgccgatgttgtacgtttcccccggttttccgcaggaaacgaccgtcaacagcgcctcgcagtgatcccccacatacagccagtcccgcacgttttcccctttgccgtatacaggaatgggttccccgcccagcgctttcaggataacgacgggtatcagcttttccgggaactggtaggggccgtaattgttggaacagttggtgatcagcacgggcagcccgtacgtatcgtgccaggcgcgcaccaggtggtcgctggaggccttgctggcggaatacggggaatgggggcgatacggcgtggactccgtgaacaggccttcctttcccagggagccgtacacttcatccgtggaaatgtgatgaaagcggaaacgctcctttttctctccctccagggaacggtaatattccagggcggcctgaagcatggaaaaagtgcccatgacgttggtggtcataaaatttcccggatcgtcaatggaacggtgcacatgggattccgccgccaggtgcatcacccagtccggagcgtactcccgcaaagtgcgccgcatcagggaagcgtcccggacgtcggcgtgcagaaagcggtatgccggagaatccgccgagccgtccagtgaatggatgttgccggcataggtcagggcgtcaatattcaagacttcatggccgcgctccagcagcagcctgaccagattggagccgatgaatccggcgccgcccgtaacgataactttcatagcactgttttcagggaaagatgcggcgccatcatacagcagcggcgttttttttcaaaacaaatccgcccatgccgcgggaacgtggcggcatgggcgggaaaaagcgggttccgtaaccgctgagacggctagcagctcagctcccggcaaaggttgatgatatcctggttcacggagtactgctgcccggctacggaatccagggaggcataaccgtactggccgtcatgatacaccatgatctggttgatgtccccgttgttcagagcttccacggcgcgggtggcaaaacgggtgcccatcaggcggtctcgggcggtgggggaaccgccacgctgcacatggcccaacacggtcaggcgggtatccatgccggcgcgttccgtcagccagcgggtcaggtactgcgccacgcgggtgccttccgccaccacggcaatgatgcagcttccttcctcattgatgacaggctggagtcgcttgtaaatggattccaggtcatacggaatttcagggacaatgcagatatccgccgcgctgcaaagagcggtggtcatcgccagatagccgcagtcccggcccatcgtttcaatcacgaaagcgcggtgatgggaacgggccgtatcacgaacggaatcaatgcaatccagaatcacgttctgggccgtatccacgcccaggcagtagtccgtgccggcaatgtcgttgtcaatcgtagccgggataccggcaaaaggcacttcaaaatcattgaaaaagtcgttcagggcgcggaaggaaccgtccccgcccatgatgatgagcttgtcgatgttgcgttccttcagatgctcgtaggcctgcttgcggaattcgtagtcgaaaaagcgcttggatcgtgaggaacggaggagagttccgcccctgtagatcatatcgttggtcagttcccgggtggcttccttgatttttccatcgatcagcccttccaagccgtcataaacaacgtacgggttcatcccaagctggcgggcatgatccactgccgccttgatcgccgggttcattccggcggcatcaccgccagatgtcataatggctattccactcataagtaataaggttaacttgtccggggggaaatgttaccgggcggaacaaataatgcaagcgcggagtttttactggcgcaataaacggcaacgcttcatgatgcggaggcatgaacgacactgcagcagccattctgaaagccacggccgccctccgggacggcacggagaagctccggttcgaatccccggttcatgttacctacaaccctctcacctatgcatgggggccgcatgaacagtatgtgcgcacctacggaaacggggaaaagggccatctgttcctgggcatgaatcccggccccttcggcatggcccagacaggcgtccccttcggggaagtggacgccgtcgtcaactggctgcacatccgcggagaagtcgggcggccggaacatacccaccccaaacgtcccgtggagggcttcggctgccccaggtcggaagtcagcggccgccgcctctggggacttttcgcggaagctttcggcactgcggaaaacttcttccgtcacaattacgtggccaattactgtccgctgatctggatgggagccaccggagccaacattacgccggacaaactgccggcggaacagcgcgccgccgtggacgcggtatgcatggaacacctgctttccctcatcaccatcctgaatccccacacgctggtgggggtgggcgcctacgccacgcagaagctgcgggacgccgcctcccggctccccggcaaaagcttcaccatcggcacgttgctccacccaagccccgccagccccatcgccaacaagctctggccggaacgccccatccagcagcttaaggaactgggcattttataaaaagagcggaggaggtcgagcggagagttccgtgacatggaaggaatcaccagagcgacaggccggaaatcggcagttcatcttgttcccctccaaatctacatcgttttgaaggaatatccggccccttttactggcttgatttgcccagggacacggccttcctgacggaagaaaagcacgccggcatctaccgggacggagaagaacttaaacgcctccccacttccaccacaaaaatcagcctccctccaaatcaatcatcattcttaaccctccgctctcccccgcaggcctttttactggacagggagaaaagggttccgtacagtttccgcgatcttcaagcgttccgaatttatggcaatttcagattacatcgtgaccattggcctggaagtccactgccagatcaagacaaagagcaaaatgttctgctcctgcgagaccggctttggctttgaacccaatacgcgcgtgtgccccacctgcctggggctgccgggcgccctgcccgtcctgaatcagttcgccattgaacgcacgctgctgaccggcctgatgctgggatgttccagtccggagatttcccaatgggaccgcaagaattatttctatccggacatggctaaaaattaccagacctcccagctggatcttccgctgtgcctgggaggggaagtgcccctgtacccctgatcctatccgaatgacgtgatcaaagccggcgtcccccctttccgcaccgtgaagctgacccgcatccatctggaagaagacgcggcgaagattacccatcatgccaattattccctgatcgactacaaccgcgcggggtccgccctgatggaaatcgtttccgagccggacatcgacaccccggaagaagcctacgcctacctcaagtccctccagcagattctgaattacggggatatctccgacgcggacatggaaaagggccagatgcggtgcgatgtgaatatttccctgcgtccccacgggcagaaggaattgggggccaaggtggaaatgaagaacatcaactccatgtccgccgtccgcagagcccttcattatgaaatccagcgccaggcggaagaactggacatgggcattcctcaaatccagtccacccgccgctgggacgacgaacgcggagaaagcgtcgtcatgcgaaccaaggaagacgcgcacgattaccgttatttcccctgtccggatctggttcccgtacgcacggccccgctggtggagaaagtgcgcgggcagattcccgaactgcctcaggaacggcagaaacgcttcatggaagaatacggcctgagcgagtacgacgccaacgtgctggtgggagacatggaactggcacgcttttttgaagaggcggcgcggggaaccgccagcggcaaaaaaatcgccaactgggtgattaacaacatttccgccgtgctgaatgaaaaaggcatgcgcccgtctgaatgcccggtgaaacccggcgccatccgggagctgatcgccattattgacgacggcaccgtttccaacaaccaggccaaggacgtattcgccaaaatgtgggatgagccggccctcgccgcagcgcaggccgccaagctgctgggctttgaaaaggcggattcctcttttctggacggcatcgtgcgggaagtcatttccgccaatccggacaaggtggcggaaatacaggggggcaatgaaaaactcctgaactggcttaccggccaggtcatgaaggccgccaaaggcaaagccaacccgaaaatcgtgacggaagcgctgaaaaaagccctttccatggagtaaccataaacaaagagccgcttcccttgccggtgccggctccttgcccgcagggcatcacggtttgaacagcttcctgtttccggccagggtgttccatacctgcttcacttccccggccagcgtctgcttcatcatggcaagggaaaagtccgccgcctggcccatactgatgtagggaggcagggcaagggcgtccctgtccacacgcgcgtccagcagagcggcgcccggataattcaggaacatgtccaccatctggtccacctggctggatttgtccaataaaaaccccttgatgccgacggcatccgccacggcggcaaaagaggggttgttcaggttgatctgccacggaatcagcccggccgcctgcatttccaattggatgaaatccagacaatcattgttatacaccacgattttcaccggcagcctgtactggacaatcgtggtgagatcccccagcagcatggacaggccgccatctccgcacagggcaattacctgccgttcggggtattccatctgcgccccaatagccatcggcatggcattggccatggagccatgattgaaggaagccagcgtcctcctgcccggcgtggcgcacaggaacctggcgctccagatacagggggtgccggtatctaccgtaaatacggcgtcggatgccgcatgcctgttcagggcggtcgtgagctgttccggccggatgggagactccttgtcatttccttccatataggcgttcatctccttcacgtccctggcgtggcgtttcagggcggcgtccaaatgcccggaatccgtcttttcctgcaccatgttcagcagagcttccgccgtgacggaaacatccccgcaaatacccaggtccaggcggcagcggcggcccagcacttcaccgcgcctgtcaatctgcacgatttcaggtttggtgggaatgaaattgaaataggggaaatccgtcccccacaacacgagcatgtcgctttcatgcatggccttgtaggcatctccccatcccagcagccccgtcatgccgatgcccaggggattgtcatgttcaaaataatcctttcccctccatgtgtaggcaatcggagctttcaggcggtgcgcgagcctgacgaccttgtcttccgctcccgcgcagccggcgccgcagaagaaagtaatgcggcggtggtcgtcaagcatccgtgccagaagggatacggattcatgctcaggaacaacattctcccgcgtgtaggaaggaggatgtaccagatttttcatctccgcaggggcgtccgcaatgtctccgggcaagacgacgacgcctacgtcgcgcctggcccacgcgtgctgaatggcggacatcaaaatggacggggcctgggaagcttccgaaaccagttccgcatatgcactgcattccttgaaaagctgttctggatgcgtggcctggaaatattccatgcctacctggctctgcgggatgtgggaagcaatggccagcaccggggcatggttccggtgggcgtcaaacaggccgttgatcaaatggaggttcccggggccgctgctgccgcagcatacagccagattcccgctcagctgggcttccgcgctcgcggcaaaagccgccacttcctcatgccgcacatgaatccattcaatggtcttcctcctcctcaaagcgtccgtaacggggttcaggctatcccccacaatgccataaatccgcttaactcccgccttctccaaaatttcaacaatctgatcggctaccctgtacatgcagattagacaccagccaacctccaacggattcattcttatgtgtcatcccctccatcttttccgcaccggaaaaaatgcctgaggatttcccctgatatcataaggccgccgccttttcaggcagcggcctatgaatttaccagttctctggtggaaaaccgtcaggaacggcggcggcgcatcatcagaacggccaggcccaggattcccagagaagccgaggccggttccggaacctgaaggccggcaaaaccggcaatctgttccgcggaaagttttgcatccgtccactgaattccaccccatgtaagattgggattaatccagccttggatatcagcgcgattgccgttcatgttgccgttgtaggacaacgtgtcaagcaaggaaccattcacatagacatccacagactggctttggtttgcgccagtggcggccaaagtaacgttaagaaggcctccccccaaaacaacggaagcttcagaaacgtctccacggttttgggaaaaggagccggtagaagtattcaaatttccatctcccatgccaagcttggcatctgacgtcagatacaaggcatttgccccgtaactttggcccgcgttgctgccataatacccaaacagcgtggtctgggttccttccgttaaggaagaggtatccagccagagggagattgtgtagtcggaagcataaaaattaccgccgtaaggaatgaaactgccaggaagggcactctgtgagagactcccaaacgtcatgttttttcccaatgcaataccttcagttgtcgtcgccgtaccggcagcgtaagaggttccgtccgaaggttctaaagagccgggagacgccaacgccggaacggaacaacacacagcaatggctattgatgctaatgtttttttcattttctgtgaatgatggattgagtaacaattagagagatatttcccgccctctgtatatcggattcccaatccgctctttttcaccccacccaggaaagatgagaacaagctttttcaatccgctaaaaaattgtactataattatcttctattacttatgaatataaaaaaataaaatgcagaacagatttttcatggcggctctgaaattgccatttggtaacagcaatcccttttcttaaaatagagaaaattgtaataatagtttcataattgaaatgttagattgacctcggattgggaatccggagtttcccatagttaaagatactacaccaatcctacgctgacttttgctcaaccgatacagccggagggctggataacaagaaaaggcggtatgctacccctctacggggcgcataccgccttttcttgtgtgtgggggggccaaagggggaaagttcccatttggcacacgactttgcttgcaaagtgtagtgtgttatacctactgtcacggctggcggataaaatgagggtttcgccggatggagacactcactttgcccggcagggaaacggacaggtttttgcgaatggggaaggcaaaaagctgggcggggtcgggagtgagagcgggtatatgaactattacttgaacaacctacttatctcttgatcgatatgctgttcataagcatcaaattggcccttatcatatggcgatttactatcataacaatctatcagtttaaatggtacgccataatcacttactttgcgtgcattgggtgaaagcgcattgtattcaagtttctgaagtagcaatcctaatccagctacatcttccatattgatattctcagactttgaaacttgatatcggaagaatacatcaaaaaggccgagatatttcactaaatggtacttaaaaacattgtaaacaaagtcagctacttgccgcattgcttcatcctttgttttgggattatctttccgttcaacataatattgtaccattgaaagaaaaccacctgaaagatatgaattcaataaaactgtaatcaacgagtactggttttgccccactcgcattgaaataagttgtttaagtttttcctcgtgtacaattggtaagacaatattcataatagcttgaaaaccagcacaatatagacagcaagcattactacttgctagtgttactgaaacatgcttaatatccttgatagtctcccatgacatacttgaaatataaccgtataatagcaatttatcttttggcccaacaacccggaaacaatcaaatacttctgaaggaatttcagatgcagctacttgtgagagaatatctgctttttcttggcgctcgctttccgataaatactgttcttttgttatttggtagtcaacatcggttttagtggcctgtacatcataatttttatgctccaatatttcgggttgcccatttacaatgttttcaaatccattgtttaaatctataactctgccagagtagtgttgatgaaatctacctgcgcgaccagctatatttttagcatcaaattgacgcaggggtttgattccttttttattcgatgtaataattatatttttggcagaggtatttacgccttctgtgatagtcgtagttgaaaagagacataataatacccctgtattaaataaatttataatttctttttgaatatatttggggataaggctatgatggatacctatccggcccttcaatgcttccaatacaatccaatcattgccaaatgtgtgtcccaaatgatctaaaaacatttcataagtaacactttctatcccagagcaagtttcttgaaaagaagaaatcaatgcttgatcccttaataaagctctagcgtatgcttctgtatcagctcttctgccacagtaaataatcgtattttctttaggcgtgcttaacgatttaattatattggcaattttctgccctttgcttatagaacctatttctactggaatttcatctatatgatattgccgtttactctttactgttgtgtactcctttgaaacaatttcaaattgattgtaacgtaaaaaagaaaattcgttatcttcagcaaaattattaaacgatttgtgttgctgtgtattaggttggggaagtgccatatatggatcagccaatagcatatcgcttgtcaagttacaagtaaattccaatgccaaacggtatgcggtgtcacgttcattttcgccggatgtttcctgatcaatgataaaactattatctattttgtaaatctcatcaataaaggcaaaatcaaagtgaaggtgttgatgcgagtccataaacgataagaaccgttcaggtgtaaaaataaagatgtttctttcggagaggttaaattcctcttcacttaaggaatggattttatatgcttgaaaagcatccaacctacataaacgagcgtagttttcggataaaaggctaattgccggaaaaatcaaaaggacattctggtattgcatcttttgtatgatttcatataccaaaaaggtctttccaaaagaagtaggcgcagtcaaaacaaaacgatttttctgtcttgttttgaagctatcaagaacattcttttgatacctatgtaatttgctatttcctctaataaggctagcatcatgaaacagagcacttatggtaagcgttttgatgttttcatcagatatacggcaatctgtaaatttatctttgagcaggtcaaaatattgtgggattcctgcttcattagctaaaaatataaggaaattcatatccgattcagagataggctcattttttatatagccaaaaaatccacatacttcctttacaaaagttgcagcatctaaattctttttatatgaatagtacgctttaattatattagcggttctcgtgagtctatccattttatcacattctccttgatttgtttaacttccgacaatggtaaaaaaatgaaaaacattcggtagtcgaacgaagcaggtattgcaatattaagtcgcgtatattctgaggcaatatgatcaatacactttttgatactctgatgatattgatcgatgctatttttttgataggcaataaatatggggtatattaatctaattcccctattctttatttcttttgacagattaatgtctggattttcttcccatgaatttaacaagttttcaagttgttcattgcgtgtcgagatatggatgcgctcatctatgattgcgagtaaatttcgactcaaatagccatctgaaagcgaagtgcttaatttttctaatacgggagttatcgcacttttatattgcacgtaaaatttgacttctccaaaccataagtcaatatttccatttctttccattaaatgaaacgcatcaaacccttttgcttcactattttcaatgggagaataaaaataacctctcgctgcaagaacgctcgtccttaaaaatacacgcagaatcaaatctaagaggacttcaccataaaaaccatacttcagcttggtggcatcagaggctgctggatcgtatcggatacggctaagaatagcttttcgctgttcgcgttctaaggcagtgtaatcaatttcatattcattgattgcaaattctactataccattataaatgatttttgaaatttcttgtgggtcggaattactgaaacaaatatcattttgggaggagaggcatgatttatctaagccactttcttcatgtggcaatttgcattctaataaaattgcattatgtacagcattctttagtgcttctctcatgccttatacctccgatgttaattgccagagtttaatttaacaagtttctcccaatcaatgctgccatcttcaaagcagaattcttgggtaaactcgcggacgagccggttagccgctttctggtaagaagcgtcaaattcctccacatacttttccggtagcttgtccatgaaacggatcagctttatgtagaactcttcatcgccggtcaattccgtccagaaatccttgcccgccaattccatgtaaaacttgggaagcccgcggttggaagttttcttttttccatagccgtagccgacaatcgggacaaagcgtttctttgcctgctgcgccaacttgcttgccgccatgaagttctgttcctgctttttgcggctgtccgcattaaaaacgcttgtaccggattttacagctatggcgtagatggtattatcccgttccaccataatgtccacgccctcggctaatgctttttgtccttgtgcggctgcggtggcaatcggctcaaagaacacattcccgaaaatcgtttcctcggacgaggacacaaaagcggcaagaatcgcgtcaataatttgcgccgcaccgttcatagctttggcccggaacaggtacgggttcttgcgcttcataacagcttttacactcaagctgtctacttttttaatcaggttcgtatagaaattgtccagtgctgttgcaatcgcttctacgatagtatcttcattgtagctgttatttataggcatagctgtttccccctatttcaatggcttgtttcagtttttgatggatatctgtccctctgaaccgttttgtgtggattccggcggattgatctgcaacggaaatcaccgctttccccaaggccaatgccagccctaccgggacagcgttgccaatctggcggtattttgctgcgcttgtccccatgaacttccaatcatcggggaactgctggattcgggcatattcccagatacttaaaggccggttttggatggggtggcacatcatcgttgctttttgcaccggggatgtaaccaatgtcggggacggctggctatacgacagccgccggtagaagccgactttccctccaccagaaccaaaagcgccacccatggcctctttccgcacatcttccggtaggtcacgccaattcccaccttccgggacaaggcggagatatgcaaggcggtctttgctgaatgcggcacactccccacagtcatactccagatccttgatggtgtcccgcaatgtgcgccagcggtattgcgggtcttggtgcatctggaagtgggtcgggaaaggcaggaaaatatcttcgttatcccggctcccgatcaagacgaacctctctcggaattgcggcacgccataattgacagcatctaatatcccgtataccgtcttataccccaatttgttaaactcggacaggattatatctaaaacagtccccaaacgttgctccgggtcatttttatcccgttctaccagcgggatgttctttaatggggcagacataatccccttgacattttccatgataaagaaccggggacggatatagtcaatcatgcggataaagtccatgaacaaactgcctcttgggtcgttgatccccagccgcttgccagcagtagaaaacggctgacagggcggcccgccacaaatgaggaaaggttccccctgcgccagcccggtctgtttcagcaaatcggcttcatctatctcacggatatccccgcccaacaccttatgcccattcgcacacatagtagcaacacaggcggggtcaaaatcctgcccaattacaatatttaagccagcttttgcaaggccgatatccaaccccattgctccagaaaacagggagattacatccctgtttgaagcgttatctttaaaatgctgtaaatccataaggccctcctatcaaaccttttcgccatctggaaggacaaaatgacgttcaaaagaacaccccaccgtttccgccagatattctaagtcggaaattgtgaagctttcccgcttcatttttgagttgaaattttgcggtgtagtccccatccgccttgcaagttccgcaacgctgatatcggagcgcacacataaaactttgatctgttctgatatagtcataagggtactccttgtagattatcaatttataaattggagatataaaaatattattttatattttcaacacagtccctcatatcctcgttcataccatcagactgcatcatttgcaactcgaaaatcaaatcttcgacagcttccacacattcctctgttcgcttttgtatctcttgcccccagaagtgcataggaacccaatccattgcaatcaacttgaagtcattctcccggtcacgagccatattacgttcaatttttttgatccaatattcccggttatggctcagcttttgtttcttgatttcccaattatagccgtgaaaaaattcgctatcgcagaaaatagcaatcctgtattttgttatcgctatatctggggtgcccggcagctttttgtagttcttccgatatcggatgcccttatgccagagggctttccgcaataggacttctatgttggtatctttccccttgatatggctcattgtccggctccgttgctctggggtcattacatcgctcatggtttttcctctttttgagcatcgcctgcttgttctatcatcttttttgccaatgcttgaaactgcttggtggtttcctcgtccatcggtgcaagttgcccgatctgtccggcaatcattgccgttacatcatcaacggaaatcgggttttgcttctgctccgccaatgtgtcccgcatggtctggaacatggcggcggtcacagtttcccccggctgttctccgttttccatgtctttcttaatatcccgcaggatagcaaggaacacgctcttgattttctcaatctccgcttcatgctcccccatcttctgtgcgttcaatagctgtaaatcctgccttgcttctgtcctgtgttccgggcgttctttcatcaggtcggacagggaagccgtcgctatctcgataagctggtttcttgcggatatcccctttgccgccgtatcttgaaaataaatccgtatcaaatctatcagcttcggaaagttcttgtgttccaaaaggcggttaaggatttgcacatcgactgcgcccgtcacaagccccctcacggctccctcggataagcccaattcagaaatatcatagcttttgcggacgctcacagtggacaagcccagtatgtagtccgttgataccttaaattcttttgccacgcccatgagaatatcattgctgaccgttcttgtttcgccgctgacaatccggctcaactgggacgcagaaacgcctatcttctccgcaagttccttttgtgtgatgtggtttccgttgcataaatcggaaatccgctgtccgggtgttccgggtaaagccatagacacgcccctcctccgcatacttccattatacagaatgattgcaaaaatgcaatttccaaagtgtaaacttcatcaaaatgcaattctcgcagaattccggggattgtatttttttcgtgtagacttagggtagttcatcgatggacagcaccttgaaaacagaatgaccgtccgaaaaggaatatccggagggcaactgaaaaagtacaaggttacgattaaagacctgttagcaaaaaatgaaaagctggaagcaagggcaaaggccagcgaaagcggcaaaatcaaagaccgcatggaacgggcgaagctggaaagcgaactggaaaatatgcaaaggctggttgaccatattccgccggaggtgctggcggagttgaagcggcaacggcacacaacaaaggaaaggtgattttataagcagaaattttcgccgcccctgtgcggcattgtaccttgacaactgaatagggaggacactgaatgacaaaaagcgaaagcgatatttttacgcccggacagagggaattggacacaaaaattgaacggccccacgaagcgatggaagccgccgaccagacagcggttgacgctgaaaagtggataggtttgatgaaacagtatgtcaatcccacagaattgacggctgaacttctgaatactctgattgaaaaaatcctcgtccatgaagcggtcaagggtgaggacggaagccgggaacaggaggtagaaatcttctaccgttttatcggcaaaatcgaatgacacatcttgagatacccaacaatatctttaattaagggaaacggttgttttcttccccttcatttctaagacctttttcttgaaaaagagccttccccaaattatcctcccgctagctgtaatattatttcatcatgaaatttttcaagacaaccattgccatggcaaccctgctgggctgcctgcccacatcccccgcagaagtcgcctttccggggcctgcacccggaacagccagcgcggaacaatccgcttccggctatactctttccaataacatcctgacggccaaatttatccttcggaacggaagtctttccttcggaggaatgacttccaaactgggccccgtcgccaaggcaggggatgaattattcatcatcaatcttcaggacggacggagcattaaatcctccgagctgaaagcgggaaacgtcaaattcgtctcccttcagcccaaccccaaggccttcaggctggctgaccgcttcccgggaaaagccgtcagcgcaacattccaggctctgaacggaacccttcgcatctcctggcgtgccgtgctcagagaccattcccattacctgaggcaggaactccgcctggcaagtacgaagcccgtccagatgaaaaacatcgtagcgatgcaatatgacctggcagaagggaaagccggggcaccctccgtttccggaaacgccagaggcgcactcatcgtcaatgacctggcgttcaccgccctggaaactcccatgggcatcaataccgtgggaggcgccggaaatatggaagggggagaaaccgccatctggagtgcggacaagtgatccacagcctcatggatcggaaatttcaatgttccccaggaactgaaaaagcagtacggagaacaggtttccagtgcggaaggcccggtttccattgacggcaaaggagcatgcaccgtcaccttccagtataagggaggggacaagggcaacaataagctgaaccttgccggcgtgcagctcctctcttccaagggggccgttcttgactccgatttccacaacggcagcaccggagattccaatgccggcaatacttacacggtacaggttccctccaggggaaattacattctgcgctactgggcccagaccaagagcgaaccgattgccagcaagggggaaatcaccttttccctgcccgtgcgcacgctggaggaaaagcaggaaccccaggcggacgaatcccggctggcccagggactctggagccgtaaaaccaccttgcagcccggggaaatatgggacgtatcctccgttctcggaatttttgcccccggccagaaacgccgctccttcctggcctatatggaacgggaacgcgtgatgccctaccgccccttcatccattataattcctggtatgaactgaacatcaaccgcaacaatgattcggaccccgccaagcgcatgacggaagaacaatgcctggccgtcctgaaagactggcaggaacagtttttccagaagcgcggcatgtccattgacgccttcgtctgggacgacggctgggatgaattcaacagcctgtgggatttccacaaaatgttcccgcagggcttcaagcgcattgacgccgccgccggcaggcaaaaggccggcatcggcacgtggctggatccggtggggggctacggagcctccaagggcaagcgtctcgcttactggaacgtgaagcatccggacaacaagatcggcaatttccagctctccaacaaggaatattttgacgcctttgtgggccgctgctcccagatggtgaaggactacaatatgaagtacttcaaattcgacggcatcagtacccacttccatgccaaggggcccggcaacgaagaggatgcggaaggcatcatccgcgtgctgaacgccctgcgcaaaaaaaagggggatctttacatcaactgcactgtaggaacctgggcatcccccttctggttccgttatgcggattccgtatggaggcaggagaatgacttcggcaccatcggagcgggcgacaaccgcgacaaatggatcacctaccgcgaccgcctggtgcatgaagtttttgtgcagggctccccgctgatgcccatcaattccatgatgactcacggcctgatggtcactaaattcggtcctccggcctgcatgccccgcgatccggaaaacgtcaagaaagaactccgctgcgccacggcttgcggcacttccctccaggagctctacgtggatcgggacctgatgagcgccaacggcggagttctgtgggacgaactggccaaggggatcaagtggatacgccgcaatgcggacgttttggacgacgtgcactgggtgggcggcaatccgtggaataaggaaactaacgaaggggccgtgtacggctgggccgcatggaataaaaacaaggccaccctggctctccgcaattcctccgaccaggaaaagagcctgaccggaaccctgcgcagcattctggatatccctgcgaacgtcaagggctccatcaccttcaaggattcctatgacgaccagcggacgctggacggcttctccggcagttccgtagacattgataaggaaatctccttcacgttgaagccctttgaggtgctggtgtacgaagggggaaaggtcaaataaatcagccggcccacacgcccggccaaagccggaacggcgttggaaaaaacatattgggggaggcgggattcccgcctcccttccttgttcccgtgcgggcagaatccgggtcagaatgttttttcaaacgtcaccgcttccagcggatcggcagggttgaccggcatcaccaggcattccgcaccttccccgcccaggtacaacatcaggctcctgccgggggaataggcgatggagacaccgtaatatcccccttttttcaccagggaccaggttccgcggcaggaagaaacgagatcttcctccagcacggaaaggtcctccctctcttccggacgggcaatccacctgccccatgcctccggacggggaaaggaagaaatctcgcacgtcccgtcttcattcaggaggagcgtggaagaactgacctggaaaaaacgcttcaactccggagggcggaaaaaccgcctctccctaggagatggttccacctcatactttccggaaagggcctgcacatccggctcatgaatccacaggaaagctttttgacacaccgcctggcggcacgccagccccaccacggccagcagggaaaggaacgccaggacaaacgcccacagggccagccgctttctccaccacgcataaacggcggccagccccgccacactgcccgcgcaaacccagaacccccaggaacgggaaaggaaggccagggcatccgccagcacggaaaatccatgagaaagatcattccacataggtgctccagaatctccggaacatagtcaaagtcaagacaacaatgccgcctttcaaggcacgggcctcaggctgcgccccgataaaaaactcccgtcatcactcctgaaaatattcctccgcgcttttctcacaggctccaatcaggtaagaagcatctgaaccatgaaaagcgcagcacatcatcaggggctttcggaacagcaggttctggaaaaccggaccagatacggggtcaatatcctgactcccccggaaaaggaacccctgtggaagcaatttctggagaaattttcagaccccatcatcaaaattctgctggtggccctgctcctgtccgtaggcgtggctttctaccagtttttcaccggaacggaaccggccagcgtcttcctggagcccgcgggcatcctggcggccatcctgctggccacctgcgtggggttcgccttcgaggtaagcgccaacaagaagtttgaaatcctgaaccaggtcaatgacgacaccatggtccaggtcatccgcggcggcaatatctgcgaattgccccgccgggacgtggtggtgggcgatatcgtcatcctgaacacaggggaggaggtaccggcggacggcgtcctgctggaagccgtttccctccaggtcaatgaatccacgctgacgggggaacccctcatcggcaaaaccacgaatgaagcggaattcaagaaggatgccacctacccctccaaccacgtcctgaaaggaaccaccgtggcggacggccacggcgtcatggaagtgacttccgtgggggacaaaacggaatacggcaaggtttatgaaggttcccagatcgacaacaaggtgcagacacccctcaaccgccagctttccaggctgggcgatctcatcacctgggccagctacgccatcgccgccctcatcgtcatcgggcgcctcaccctgtatttttcccatctgccgggccccgtggaatggctgagcgcgggaacctacattctgaataccgtcatgattgccgtgaccgtcatcgtagtcacggtgccggaagggctgcccatgagcgtcaccctgagcctggcgctgagcatgaagagcatgctcgccaacaacaacctggtgcgcaagatgcacgcctgcgagaccatgggggccgccaccgtcatctgcacggataagacgggcaccctgacgcgcaaccagatgaacgtgtacaaggcggatttttacgggctggggaacgccgtcccggcggaagacgagccgggcaacctgatcagggagggaatcgccgtcaactccaccgctttcctggattacgcagacccgaaacatatcagggccctgggcaatcccacggaaggggcgctcctcctgtggctgcacgggctgggcgtgaattacctggacctgcgggaaaacgcccgcgtgctggaacagctcactttctccacggaacgcaagtacatggctaccgtagcggaatcccccctgctgggcaaaaaagtcctttacgtgaaaggcgcgccggaaatcgtgctggggctctgctccaccgtcctgactccggaaggccaggtacccgccgcggacatgcgccccgccattgaggaacagctcctggcctaccagaaccaagccatgcgcacgctgggcttcgcgtaccgcattctggaggatgacgccccggtgttcgaggacggccgcatcatccgcaaagacctggtttacctgggcatcaccgccatttccgaccccgtccgggacgatgtgccccaagccgtgaaggactgcatggacgcgggcatccgcatcaaaattgtcacgggggacactcccggcaccgcacgggaaatcggccgccagatcggcctgtggacggaggaggattctccggaccgcctgatgacgggagtggaattcgagcagactccggacgcggaactgctggaccgcgtgatggatctgaaaatcatgtgccgcgccaggcccatggataaggaacggctggtcaaactgctccagaagaaggaccaggtagtggccgtcaccggggacggcaccaacgacgcccccgctctgaacgccgcgcaggtggggctttccatgggagacggcaccaccgtagccaaggaagccagcgccatcaccattctggacaattccttcatgagcatttcccgcgccgtcatgtgggggcgttccctgtacaggaatatccagcgcttcatcgtcttccagatgaccattaacgtggcggcctgcctcattgtgctcatcggcgcattcctgggcacggaatcccccctcaccgtcactcagatgctctgggtgaacctcatcatggacaccttcgccgcgctggcgctggcctccctgccgccggacgaacgcgtgatgcaggacccgccgcgcaagaccacggaccacatcatcacccgccccatgggccggaacatcctgggcgtgggcatcctgttcgtcgctttcctgttcggcctgctgcaatatttcaagcatgcggacattaccagcctcacgcagttcagcctcagcggctacttccgcagctacctggatttttccgccccggaacatgaactgacgggttatgaactgtccctgtttttcaccattttcgtcctgctccaattctggaacatgttcaacgccaaagcattcaacacgcaccagagcgcctttgcacgcatgggcgccagcattggcggcttcggtctggtagccctgcttatcctggccgggcagtacctcatcgtcacctttggcggaaagatgttcaacgtggtgcccctgagctggacggactggggcctcatcttcgcaggcacctcccttgtcctgtggttcggagaactggcgcgggcattcactccggataaatccggtgcccgctcctgaaccgtccgggggaattccccccgcgcatgacgcggacggcgacgccgcccggaaaaccttctttcaacaaaggcgcccgcaggcgtgtcattcccagcatggacttgacacgcctgacgggctctatctccagccccgccgttttcctcttcctgctttccctcttttttgccgggtgtaaaaagacggaacaggttccgcatgaaacgcccacgcttatttatgaacaccccgtcaccatggatattccggtgacgggcagctgggtgggccacctggacggcgtggacaacgcctccatcgtcccccagattacgggctaccttcaaacgcagaattacgccaatggcgctattgtgaagaagggggaagtactcttccgcattgacgattccacgttcagggaccaggtatccaaggccaaagccaccctggcccaggcacaggcccagctacagcagttgaattacgacgcggaaatttacaggcccctggctgcggagaatgccatttccaagcagaaatacgaggatacgcgcctgtccgcccttgccgcggaagcacaggtgcagcaggcggcggcggccctggccctggctgaaaaaaatctttcctatacggtgctgtacgcgccttttgacggaatagccggcatctccaggacaaacatcggcgacctggtcagcccggaaagcggcccgcttgccgtcgtctcctccgtcaatcccatccgcgtcaatttcgccgtcacccagcaggaatggattcagcaggcggggaaaaacgggaatgaaggcgtccagacgggcagcaagctggacattacgctgaaagacggcaccaaatacccggaacaggccacggtagttgccattgaccgggcgttcaatccccagacaggcaccatccgcgtacaggccaaccttcccaatgcggactatctgctgcgccccggcatgttcatcatcgccacggcccggctggccaccgtcaaaaacgcgctgaccgttccggcaaaatcccttctttcgacacaggggcgctttttcgtgattgttctggacgggagcaaccacccttccatcatccccgtacaggccgggacgcagcttggagaccggcagcaggttattcctctgaaaccggattccctcaccccccaaagcaaagtggtcgtggacggtcttctccaggcggaagcagcctccagaaatccggccgcccgcctgaaagcggtacccgccagcaaccaataagctcctcccgccatggctgatttcttcatcaagcgccccatcctttccatctgcctctccgtcatcattgtcctcctgggggccttttccattctgcgcctgcccatctccgagtacccggacatcatccccccctccatccaggtgacggccacttatcccggagcggactgtgaaacggtggtcaagtctatcgcatcccccatcgaacagcaaatgtccggcgtggacggcatgtcctacatgacttccgtcaacaccaacaacgggcaaatgagcatgatgatcctttttgaaatcggcacggaagccaacatggatcaggtactttcctatctgcgctacgggcaggccacctcccagctgccgtcggaagtcagcgcgctgggagtctccctgcgcaagacaagcggtctgcccgccctggtcgtcagcctgtattctccccaggggacttatgacggcctctggctggccaattacgcctatatcaatatggtggacgccatcaagcgcgtgcccggagtaggagacgtgcaggtgttcggggcaggccgctacgccatgcgcatctggctgaacccggaaaagatggccgctctgaatattacggccagggacgtgatgctggccgttcaggcccagaacgccgtgaatcctgcgggcaagataggcgcacagcccgctccgccggaccagcagctttccttcaccgtgaaagctccaggccgcctgaccagcgtgaaggaattcgaaaatatcgtggtacgcgggcaggacagttccatcgtaagagtgggagatatcgcccgcgtggaactgggctcggaaacctacagcctcagttcttccgtaaacggcatgcccgccgcttccatcggcatttacgaggctcccggaggaaatgccatccagctggtggacaatatcaaagacctgctgaaggatacggatatgcctcccggcatggattacctcgtttccctggattccacgctggccgtccgcgccgggattgaagacatcgtcagcacgctggtgattgccctgggcctggtggtgctggtggttttcattttcctccagggctggcgcggtacgctgattccggcatttgccgttccggtatctatcgtgggcgccttcatcgcctttccattattcggtttttccatcaataccatctgcctgatggggctggtgctggccatcggcctggtcgtggacgacgccattgtggtggtggaagcagtaaagaaccatatttccaatggagaaaagcccctccaggccaccattgcggccatgaaggaagtatccggccccatcgtcagcacggcgctggtgatttcctgcgtctttatccccacgctgctgttgcccggcgtcacaggcaaactgttcgaacagttcgccgtgaccatcggcatgtccatcatcatttccgccttctgcgccctgtccctcagccccaccctgtccgccgggctgctgagaggggggaaagcggactccattcccctgctggggccctttttcaaattgttcaacaagggtttcaacaaggcgcgcgactggtacgtggaaatctgcgccaggcttatccggcacatgtggctgtccatcctgctgctggccgccatgaccgcccttctctttcccctggccaaactcattcccagcggattccttcccaatgaagaccagggctacctgttcggcggcgtggaactgccggataatacatccctgaacgtcacggcagacaccgccgcgcggattgagaaaatcatcagggaggatccgggcgtggacgtagtgactaccgtcaacggcttcaacctcatcagctccgtccaaagctcatccaactccttcttcttcatctccctgaaaccgtgatccgaacggactgctccgggcatgacggcggacggcatcgccgcacgcctgaaaagcaggctgaacgcggaaatttcctccggcgtggcgtatgtggttccgccgccgcccctgcctggcgtaggaacgtccggggatgtcacattcctgctggaggaccgccagggcatcggggaaaaattcctggccgccaacacgtccaaattcatcgaggcagcggaaaagaggccggaaatagcggacatcagcaatttcatgtctccctccaaccttcagtacaacctgaatgtaaacacggagcaggccactctccagaatatggacgtggatgaaatttacgccaccatccaggcatacatgggaagcaccttcctgaacaatttcaatatttacggacaggaatggcaggtgtacatgcaggcggacgcaccgtaccgggacagcatcgacaagctttccatgttctatgtgcgcaacaatgaaggagacccggttcccctggattccgtaatcaacgttacgcacggctgggccccggaattcctgatccgccagaatatgttcaacagttcccagctcaacgtcaccccggctccgggctattcctccggccaggtcatgaacgccctggaagaagtttttgcccagaccatgccgtccggcatgggatacgactattccgggatgagctaccaggaaaaacaggcgcagaaaggtatcaccatcggcatgatctttgcggcatcagccgtgtttgtcttcttgattctggcatccctgtatgagagctggtccctgcccgtagccgtcttcatgaccgcccccattgccatcctgggagcatttctggccctgtggataaccgggctggacctgaacatttattcggaaatcggcctcatcgtcctgattgctctggcggccaaaaatgccatcctcatcgtggaattcgccgttctggaactccgtcagggcacggacctgctcacggccaccctggatgcggccagaatccgcctgcgccccatcctgatgaccagcatcgcctttatcatgggctgccttcctctggccgtagccacgggagcgggcgcagcggcgcggcaggtggtaggcgtcggggtcatcggcggcatgattacagccgtcttcatcggggtatttttcattccttccttcttctacctgattgccaaacttgccgggctggacaaaaaagcggcgcggaaactccaggaaacggaacagggaactcccacccccgcgaagcaggccggatgacacttccgaaacgggaaaacggctcccgcacagcttcccattccccctacatccagaatatccaggcccagaaagccttcacgaaaacgagcaccacattaatcagcagccccaccttcaccatggtcatctgagggaattttcccgtcgcgaaggccagagcgttgggaggagtggaaacggggagcatgaaggcgcaggaagcacctatgcctaccagaagcaccagcggcgtagcagacatgcccatggcggaggctaccgtgaccatcagcggggccaccagggccgcactggccgtattggaacagaattccgtcagcgacgtgatgaagaggctgatgatgagcaggatgacgatggggctctgccccatggcgagagaagatacctgatccgccaggaatcccgccgcccccgtctggacaaggatgctgctgagcgtgatgcctcccccgaacaggagcaggacgccccagtccgtatttttggcgatgccgctccagttgataaccccgcacagcggcagcagcaccgcagcactcagcgcgatgagcgtgtccatggacggaatgccgcccaaagcagaggaaaggaaactgctgcacatccagctcccggccaccagcacgaagagaataaggacacgcacctgcctggcattcaacctgccctccgtttttcccccttccgccggcgtcatatccacatgcatccccagacgcggacggaagaaaagatacatcaggcagaaaacgatcaccccgaacaccaggacaatgggcatggcaatccggaaccattccgcaaaccccatgcccagttcatgcgccgcaatggcgttgggaggagaccccaccagcgtccccataccgccgatggaggcgctgtacgccacccccagaatagcaaaaggagccgtcgtcttaagtttttccgccggaatgcggtccagaaggccgatcaccagaggaagcatcatcgccgccgtagccgtattggacatccacatggaaagaaacgccgtagccaggaaaatcagaatcagagccatccccagactcccgcgggccattcggaggatttttcccgccagccaggtatcaattttctgttcgtggagagccccggccagggcaaagcccccgaaaaacagaaaaatggtaggatccgcaaaaccggacagggccttcgcccccggcagaatccccatcaacatggcaagcaccggcaccagcagggaggttacggttacgtgcagggcttccgtcagccacaggatgccgataaaggtaagaacagcaagccccctggccacctccggctctacgggaagccatttgagcatagccaggaaaagaagcacgtcacacgcaatgatgatgtaattgcggtgccctttgggagtgtctgtagtacggtggcgcataaagcaaagataaatgacgctattttctttgtacgcatcagaaaaacagtgtcaatgcttttccataaaaatcccggaaaaggcctttcccggaaacagggaaacacggaccagcgcatcggcttgaggatacgcacggcgcgcattaccggaaaagcagcgcctcttcttcctgcttctgaaaaattcaggaagtccggacacgcaaaaaaccgccatgcaatcgcacggcggcttgtaacaactgtttgactggcgcgcggaggggcagcctccgcccgggcaattattcggcggcgggttcagcggccttcttggcagccggctttttagcgggggccttcttggcggcggcagccttggtttcagtctttttggccggggccttggccgcagtcttcttggcgggagcttccttggcggcaggcttggcatccttggcaacgggaacggccagacggataggcgcattggaattcaacttggactgttccttcttacgcttgaggtattcaatacgtctgcggcgcttggtgactttgcggatttgctgtcccatagtgataattgctatgatatttactaattcttacgagctccatgtggcacatgggcgtggatacaactaccaaccccacctcccttacgcaagcacaaagcgttattaaggcacagaaaggcggaggcagtccccggttaccccaacccgcgcggaagaggaaaacaacttggatgaaggaggctttaccacaatttcagcgcatccacccggaccggctgttcccagcgcagatggttccggattgcggaagcgatgaattccaggccgcgctccaccgccgcaaccagtccatccccggcagccagccgtgccgcgacggcggcggacagggaacagcccgttccgtgagtgctcacatcctgtacgcgcgggcgctcccattgccccagcaggcagccgtccgggccggacagcacgtcccggcagtccccttccagatgcccgcccttcagaagaacggggcatccgtacctgacagcgaggcgcgcggcgacttccggcagttcatcccttcccggattaacggaagagcggagcaatacggcagcctcatccagattgggcgtaagcaatgccgcacccggcagcagaagctcttcataaacagccaccgcttcttcccgcatcaggcggtcgcccgccgtggcgatcatgaccgggtgcacaacgacgggaatatccgccccgtccagcaccccatgcaccgcacggacgatagccggggaatacagcatccccgtcttcacggcgcgcacgggaaaatgttccagattgatgcgcacctgatcagccaccagcgcagggtccacctcctgaatgccgcgcacagtccccggcgcctcggacacgacgcaggtgacggccgtaagcgcaaacgcccccatggcatgggccgctttcaggtcagcctggagcccggcccccgcggagcagtcggaaccggcaatcgtcatcattacgggaatactcatggccttgtttttaatcgggaaggaagcccttgaacatcccaaaatccgcatgtgccgcctcaatgtcacaaatccgggtgggaaaacaaggagggaatgccacaatcatcccatgacgcacgcctccccagccccggatgaacaggaattctggcttttcattcaggatgcccctctgccctccgccgaggaattgcagaagaacatgttccgcctggacggctgtttccggctgaacctttccggtgaaccggaaaacgctccggaccatgtgctggaaggagaatatctggatgaagagggagaatcccagctggacgtattctgggtcatggaaacggacgacgcgcgccaagctttcaaaaaggacggcgcggctctccggcagatagggaaccgcaccaaaatgctgcgcttcattctggaagacgaatatgccctgggccatgtattcgccatgattcacgccatactggaacaccgggacggcctgctggttattccggacacccggggaaacattattctggaacggaggaaagctttggattttctgaacagggaaattcgggaaagttaacgtttttgcgtttgcggcgcagggcttccctcgcgttccgcattcagttgaagcgccttctttttccagacttccgccatatccgcatcctgaggggccccttttcctgtgctgtagcagacggaaagcatcagcatggcgttgacgtggccctgcccggcggccagccggagccagctgaacgccttgccctcatccacaggcacgccggaaccttccagacaggccagtcccacaatatactgggaatgggcgtctccggctgaagccgcctgttcataccacttcatggcacgctccatatcccgctccaccccctgcccctttgcataaatgttccccagatagacggacgaaggcgtattccccccgttggcggccttctccagcagcaccaggccggaagcggcatccttctcaacccccatcttcccctccatgtaagcccggcccagcagccccatggctgccggatgttcctcatccgccgccttgtgccacagccccagcgccttattcaggtcctgatccgcgccatcccccttgaaatacatcattcccaacatgtacagggcgtttccccgctgggtccccgggcgggcaagcccgtactcaaaccactccctggccgctacggcatcacgcttgattcccgtcccatacaggaacatggcgccgatgaccgtttccccggaatacccggaaccggcctctgccacggaatcacaccaggaccgcacatccagcggatgaacccagccattctgcaatccctccgcatacagggcagccacatcattaagggctttcacatgctcgctaccattttccttctcgcggacggagccggcaacagcagcgtccagacgctctctccatgtctccgcctctttccgcaccgcagacggcttttcccgttccgcagaagaagcagcccgcttttccccggaagaaggggcgcggtcacatccgcacaaaaaaaagaaggcggaggaagccgcacataaagagacaacttttttcatcatggccattaccataagacagcctcatcaggctgccaagaagagaaatgacggaaacgccgcacccgaacgctatggaagagcgaaaccgaagagccggattccctctttttgcattgaatattttcctctttttgctctactgaaaccagttcaacctctgatgaaattcgttccgcccctgtatctcttgacatgcctgggcctggcgttcctgggaagtttttcctgccggggttccgcaacggaacttcccgtaaaatacatttttgagctgtcggatgaaccggtgaaagtgcaccctggcaaaatagacaccaagagcgttttcttccccaaatacgcacgcggaacctctccggaaaccctgaagcggcaggcagccctcttccaatcccatactccccacgaggccaccaaaagcaaaccggccatcagcatccacatgaatgacgacaaaacggaaagggacgtccatgagcggtcaggctatgagtttcaccatgcggaaaaccaggaagaaattgtcatcacaaccgaaacgccggatgaggaaatctggctgaacgacggggatccggacagcccctttttccatacgccccgttccgccgccaatacggaaattcgtgaaatccccacgtcttccgattcctggcccgcctggaatgaagaggaagtcaacctgcacatgaatcttccggaatcggcgccgcgccccctggtagtgcagccggctccgtccggagccatccgcaccatcatcaaatcctttaacggaaccgtttttgaggcggatgcccagcccatgcatcccgtctgggatcagctcccgcccggatacgttcctatcccggctctcccggcctatcagcccaccttattgaagaaattacaatagaagggggcaaaagcctcagaacttgaagcggacagccccgaaaacagaccatccattgaaagctttggccgttgccgagtccacatggctggtgacatactctacagccagcatcagcttgaccgcattgacggcctccggacacagatagcaattcagccccaggtaaaaggaatgcatgctgtccacccatgcgggataatgggtgacgctgggcacataacgggtattcagcttcacagaacggtttccaaaggaacactggtattgaaagacgccctcaaaatgcggggaaatccggtaaacgggctgcagaaccaggccgtacacattctttgcaccgggctggcctacaattcccacgcctgccagcaaattccccatgatggagaaagcgccgcggctggcgtcccagctcagggaaatcacgtcctgcgcgcccgttccgcagtaatcggacgtggaagggattttccttccccgccattccgtaaaattatgggcatactggtaccccagaaactggctgtcccacatgggagaagccaccttccacttcatggcgttcaggataaacaggttgtctgcagaatgaaactggatttcatccttcaaatccgtaccgttcgcattcaggtaaatgccgtaggaatggtacaggctcttggcatccttctgaaaattggcctccagaccccagttggaaatgggaatcaattcattgcacagggcggatctttccactgttttaatccgggaggaagccaggcaatactccgacgtcaggtgaggcgtcagcttaccggccctgaacttgacgccgggcatggtcttttccagataaagttcatacagggaccactccgtatggctgccgatccattctccccgcacttcacggtgccggccttccaaatcccccacattcgtcagattggacaggcgccaggaaccgtcccccatcaggatgtcgccgcccaggtaagcgcgcctccacccgttgttatggccgccggaagacgggcagaatttattggccccattggggctgacggctgctgcctgatactggccaatcagcgtcagcttcaccttcctgatccatgaggaatcattccggtacagcaccggaccgcgatccagcacacggcacagggacggcagagagcccccggaaaccggctgggactgaactgctcccgcgccagcttccgccgccggaaaggcggcataccaacaagcggccaacaggaacagtcctggaaaaacaagcttcatcataggctaaacaaacaaattgggcgcacatcttaaggagccctctccgaaaatcaagcccggatgctcctttcgacattgttgttttctgaaagggttgttacgaagaacggcaatgatggacgcaccaatgcgcccatccggaacgtctccatcagaaggccagggacgcaggtttcagcacggcttggagttacggctacatcggcctgttgtatctccggcctgatgaaccgggccatttcaatcacttcctgtacgatgaagaaacaacgatgcagcagcctggcatcatcgcgaacagttaccggcaccaaatcatcactccggcaagctttccctcccggcccgcatgggggaacatgcctgaataattatttcccgctcctgcggggaaaggccgtaaatgtcttccatcagcccattcatccgctcatccccttccgggcaatagcggaccgcgagagcgtccgccagcccttccacttcccgcagcagggacagaccggggacccggatgggagcccggaggacaggggcggtatccatctggaaaaaatccccctgcatttttccccggcggagaaaccaaaactgcatcaggcgcgaattgaacagggccgccagatatttcatgctcacgcgttccgagcgtatcacgttgaatgccatcatcacataagcttccttttccgtataggagaaggttggacgggcacacttcctgacagccagaattttggggccgggccggaaaaaacgttcctgccggggccagtgcacatggtaatatttcatgcggcccatgcgtgtttcccgccgggcctccatcaggggacggaatttttccaaatggcgcaaaagcgtaacggcctgctccgctccgttggacggggtcagatataacagcaccttctccggagctttcagtgcatgccgccctgcctggacaggttcatacagaggtttgagaaaacgccgctcccgttccggcaacaggccaaaatacccctgaggcaagacaaataccccatcccccctccggattccgtaccgccgcactgtttccggcgccagattctccagagctcgggaagaaacgacgtcaggattcggcacaatcccctgcgtcatttcctttgcggcatccagcctgaaattccggcatgcctccatcttttccagaagatgccgctctgctgcagagcagaaggacaatccttccctgacgcacgctccggcatcttccggcaagggaaaccgacggtacggctcatgttccagaaatgattccacgtcattcacggagccgccaaaacggcggtattccggaaccaggcgtccgcctccctctccctttttctccgccagaacagtcatggtatggacgcgggcggattcaaacacgcggcaggctccgaaatccgacaggcgcagcaaaccgcaatcttccagcagcttgcggcggagagaggcggctcccgcattagacatccacttgttgggaacgaccagatgcattatgcccccccgcttcagggcatccagccccacacaggtaaacacgtaccagtaatccatgcgggaagaacagtaggaagcaagagaagaacatttcaaacggtcaaataattccttgttccctttttctccgacaaaagggggattgccgatcaccaggtcaaagcctccttcctccatcaccgttgaaagaccctgacgccagacgccggacgcagacatatccagactgtctccgcacaacaggcgatcccgtaaatccccctttcctccggcggccaaccatgcgcaacgaaaacggaaacgggctacctccaatgcctccgcgcaaacatccactccgtaaatattctcttccaaaacggcgcggattaaatcgggctccgggcaatccggttccagaagctttctgcgggcgacaagctcccggagcattcccatggtgaatgctccggccccgacggataaatccagcacacggatacttcccagcaacccggcttcttcatcaccgctcctgggagaaggcaatctggattccagccaggaagataccgcttcccgggccatccagcgaacaagaaaaccgggggtatacaccgtcccagaacggcgggcgtccgtcaggaaacgccccagcaatccttccagcacggaaggagtaacagcccggcaggcatcctcttccctcaaggaaaaagcgaatccccccggcagccggccctcatggcctgcctgccgtttctgcaagttgtccatcaaaacctctttcaatcgttcccaggtttcaggacggcccccgttgcccttctccacggagaaatactgagctataaaacaatcctgaacgttccgctccttcactgcggcattcgtacactactggaacaggccgcgcaaccaaaaggagaaattgtccagaaagccagcttcagaacatgaatgcccggaactcccttttctgaacattcccagcgccccaaaaccgtatcaaccaccgggaaggggtcattcgaacagattcacctatatgagcgcatattgaaaaactttaaccgcccgataaacatttgaaaaatatcccctattattattttccggcgcagcgctggatgaaaagtcaatcatggccatgatgaatcaatcaaaaagcgcttccggcagaaagggaatttcaagcatcgatgagacaggaggctaaggcaggaaatgccccgccagcctccccatgctgacgttgtcaccttcttcaaattcagaagaatttcctcaattcgtctctctattcccttattttgcaataaataaaatccggctttgccatcagcaagccggactagaaaagaaatggtaccccgtcacgggctcgaaccgtggacaaactgattaagagtcagctgctctaccaactgagctaacgaggcacaggaatgatggcgttccttgcaggaacaaccggatggtaccccgtcacgggctcgaaccgtggacaaactgattaagagtcagctgctctaccaactgagctaacgaggcatgtatccggcgattcccccgcgacaagcaccacccatgaagatggagccactggtcggaattgaaccgacgacccacgcattacgaatgcgttgctctacccctgagctacagtggcatcgcgagaagcgcacgagcaagtaatcataaggaaccccttttagcaagtcttttttgcaataagaccgtttttttacgccttgaatgcggaataaaagccaagagcggcaggtgacagtagaagagcttgcataggcgggggaaacatggtggagtgcatgtcctcaaagagcttttctttccctacttatcatgaaggcatattacattttccagcaggcggacgaagaaacaatcagcaacattctggactggatgcgaaaccaggaacgcgccatttaccgcgctgccgtgcgtgaacttggagccctgaaaaaactgcgccccgaattcatccagcgcaaacctcttcaggaacaattttccttcatcaagaaaatgctgtcatggaaacccagcaatgaaatcggtgaccatctgcttcaggtctggctgttgcgcaaacaccaggacatgctgattacgttcctgaataccctgggcatcccccatgacggcaacggcattgtcaatgaactgccggaaacgctggacaaggagaaactcgccaaagctgtggacgaactgttcgaaaagtaccctgccggcgtagcgtccgtctacctccagatgttccagctccagacggaagacggttgggaagaactggccgaggttctggcgaacgatccccgcgttaccatccgttgacgttattctcctccgggacataaacaagggccactccgttccggggatggccctttttatggaggcaaacggacgctcctgccgctgttattccagttccaggcggaacaagcgtccggatggcacggaacctgtttgaaacagctgcaatggaaagcatgccggaagcgcaagcccgtcaggagggaacgctgtccggctgttctggatggaatgaccacccctcatctccgtggtacaccatcatacgggacatgccgccgtcaatgaccagattctccgcattgacaaagctggagccgcatagaaagaaaacggccttcacgatatcttccggcgaaccgacgcgcccggaaggatgctgagaagcatcttccggagacaggacgccgaacacccccgtgtcaatccagcctggactgatactgttcacacgaacgccgaaaggggaaaggctcatggcgagagcgtgagttaaagaagtgagggcgcccttggccgcactatagctttccgtatccttctgggacatggaagcgcgggtggaagcaatattcacaatggaagcgccgcgggaaaaatggtcgcgaaataaaaggctcagcagatagggcgcggaaactcccacgcgcaaaacttcattgaattcctcgaaggaacagccggaaagaatgccgcgacgcgtgatgcacgcattatttaccagcacatccacacggccaaaacattccaacaccttttccgcaaaagaccgcacgtcctcttccacacccgcgttgcccgtcacgcaaagatgcccctctcccggcaattcctccagcagggaggccgtttcctcatgcttcacatccaaaaccgccacccgggctcccgccgcagcgaaagcttccgcaatggcgcggccaatgccgcaggctcctcccgtcaccaccacggtactgccggaaaaatcaacatccctcataggctgattgtcatattccactcaaaaaagtcaatcatcgccttccggcatgcggtacttaacgtgcatacattacatcgcggtaaagccccatggctctggaaaggagaggagaacgggttaccacgtccgtttccacaataagacgggccatggaagcggaaacggccatttccgcttcctccgcacggcggctgatacgctccatatccctggttttcaccagattcatacgtccggatttttggaaatcatcaacaacatagcgcaaccttttcaacttggccaccacttccaccagctccatggcgcactggtcagccgttccggcatccttgatgttgcgcaggagaaagtcaattctctccaggcacatgcagaactcttccatggccgcgacaggatcggcccagaactcctgaaaatcgattagcctgggttgctctattttgagcccctccactgccttttgcatggaaggggaatcatacatcctggccgtcgtgagtttcaggagcgcccggaaagcgcgtttgcgctcatcctccgccttctttctcatcttttccagcccatcatggaaatgccgttcaaaaccgggaatccagtctccatacttcttctccattctggcaatgttgttcatctgctccctgaccattcgtccctgaagggctacagatacggcataggcttccgccgcaactttattgtcaatcccctccagcatgtccaccatggtggaatactgttccagataagccttcagaaacggctttatcttgttgttcaaatacagggccacccgttcgtccgtcaggctgagaccgcacttttccagatcattcctgatgacatcggaatcataatacctgaattcatggagcttcagtattcccgacatcatccggtcgcgggccttgtccacgcgctcccggagaatggaatgaaaggcgggatgcatcttacgcgattcttcatgcacgcgcggattcagagccatcaggcgcccgcaattcatatcgtaaaatttaaacttctccgtcaggcgcccaagttcattcatcagggcctctcctgcggtacggtcctggatggaaacgaccagatccgtcatctgttccacttccttcaggcgcagggaaagcagctcttcataagattccaccggggaaagcctttctgacttccctgcttccgcagccccggcctcctttcccttatctccgcaggaacacaaacacagcgccagcaggagcgcgcctcccatcaacggcaaattcgggaacagagaaaaacaggagctaagcttcatgagaacgtagcgttgaggagggagaatgaaactccggcccgcatcgcggcaccggaactaccgtaaaaaagcgtcatcaaagttcaaggccttttcatttcatccgggaaaaacatttccgttcctttgacggaaaaaatattcatttaatataatgaacactcttctgaatcgggatgtcaaacttttttatccatatcatcctgtctgccgtgattcttgatattcttcaatacggacatcctcttttgagagaggaatgcgggcccgtggttcatatcaacagggatatccttgccttcctggacgatatgcaggaaaccctagcccagggaggcataggcctggccgcgccgcaggtgggcaggcccatccagctggtcaccatcaacatcccttccacagacgcaaccactacctggctggaagtggacggatgcccaactacgttgtcccgaatcatgcccttgaattttatcaatcccatcctgcatcccttcggcaaaaaagtgccgtaccgggaagggtgcctgagcatcaccaaagtatatgcgaacgtgatgcgccgctcctgcgtaagggctgttttaaccatgatggacggacggactgtgaccgtgaaatgcaacggactgctggcgcgctgcctgcagcacgaggtagaccaccttcacggcggcctgtttacggatctggtttcccccggtgaccatgacaaggtgatacggaggctcagattgacccatccggatgcttttgaagaagatgacgacagctacgctcgccgcatgaaggaaaaacgccgcgcccaggcacggaaagcccggatgccgcagcctcccggaaaaacagcctgacgttcaggcaacaaacctatccccccttttactgcccttccctaaaaaacgccccggtctccctccaggaaaccggggcatccataatcacatggaaagaaaaagagagaatcaaacaatccagtccagaacaaccttgccggattttcccgaattcatggcttcaaacccttcccggaattccgtgtagggcagacggtgcgtgatgatgggcgccacattcaagccactgcggatcatggaatccattttatgccaagtttcaaaaatttcacgtccataaatgcctttcatcttcaaccctttccaaatgaacttattccactcgatgctggaaccatcgggctgaatccccagcagggaaatgttggctccgttgcgggaattgtcgatgatgtccttcaggcaggacggagcgccgctcatttccaggcacacgtcaaatccctccgtcatttccagttccttcatcacgtcttccagcttttcacgggtcacgttcacggttcgatccgcccccagcgttttggcaagacccaggcggaaatcattaatgtccgtaataaccaccgtcttggctccggccttcttgcagacggcggcagccatgcagccgataaccccggctcccgtaatcaggacgtcctcgcccaccagatcccaggacaaagccgtatggacggcgttgcccagcgggtcaaaaatggaggcgatttccatcggaatgctcttgtggatgcgcaccacgttatcctgcggaatggaaaggtactccgcaaagcagccgggcctgttgactcccacaccctttgtattgggacacaagtgcttctgccctgaacggcagctgcggcaatggccacagacaatatgcccctcaccggaaacaatctccccgggcttgtattccgtcacggaagaacctacggactcaatcacgccgcagaactcatggcccacatgcatccctaccggaatggtctgctgggcccatttatcccaattccaaatatgaagatccgtgccgcaaatggctgttttatgaattttgatcaggacgtcattcgggccgacttccggcataggaacatccatcaattccaaaccggggccagcctgcgtttttacaagagctttcatgccccccattcatgctctttttcccctgcgtcggcaagctcaaaattcatttcggagcgccgaaaaagcctagggaacggaggcttccgcccccccttcccttcccatggaaacgcccggagcagcggcgggcgacaaacgccggaaagacattcctgttcaatcgacaattcagacacacacgcaatttgccctttccaacaggaaggaatcatgataccaaggcgtgcgagttcttcttttgaacactttactctatttacagaaccatggcgaaatcatttttacccaccattttcgagcacccgtatgaaatagaccccaaatatgggaaaagcgttgcgtacttctccatggaatacgccattgataattcatttaaaatctattccggcggtctgggctacctgtctggctcccatatgcgcagtgcgcatgacctgcgccagaacctcgtaggcgtcggcattctgtggagctacggctactacaaccagatccgtgcggaggacgggtccatggccacgcaatacatgcgtaaaaactacccgttcctggaagatcacaacatcaaattcctcattcatgtctgcggagctcccgtctgggtaaaagcctacttcctgaatccggaaacattcggcactgcgcccatgttcttcctttccacggacctggaggaaaatgacgaggaaagccgcaatatctcccgccgcctgtacgacgccaacggcttcacccgcatcgcccagtacgtactgctgggcaaaggaggcgcccgcctttttgacgaactgggcattgaaccggaaatctaccatctaaacgaagcccacggcctggctgccgccttccacgtgcttgccaagacgggcagcgtggaagaagtgcgcaagcgtttcgttttcactacccataccccggaagaagccggcaacgaaaagatggacgtaaacaccatgaatacgttctccttcttcgacgggctctccatggaacaggtgcgcgccgccgtaggcatgacggataatacgttcaactacacgctggccgccctgcgcctctcccacatcgccaacggcgtttccaaactccatggagaagtatcccgccagatgtggaaagactatgagggcatatgccccatcatccatatcacgaatgctcagaaccagaaatactggcaggatccggaactggcggaagctttccaggcccgcaacaaggaagcgttcatccgccgcaagcgggctctgaaaaaagccctcttccgcatggtgggtgaacaaacgggccgcgtctttgacccgaactgcctcaccatcgtatgggcgcgccgtttcgcggcctacaagcgtccggacctggtcaccggcaaccccacgatgttcgaacgcatgctccagcgcaccaactatccggtgcagttcatctgggccggcaaaccctacccgatggatcatggcgctattgaaatctttaaccgcctgaatgacttgacggccaaatatccccgttccgccgtgctcaccggctatgaactgggcctgagccgctacctgaaaaacggctccgacgtatggctcaacaaccccgtggtaacccgggaagcctccggcacctccggcatgtccgccgccatgaacggctccatctccgtctccaccaatgacggctggatctgtgaattcgccaaggacggaaaaaactgcttcgtcattccggaagcgcccgcccatctctccccggaagcccgcgaccgctccgaccgcgataacttctacaacattctggacgacaagattcttcccctctactacgatcacaacgacaagtggatggacatcgttttcaatgcgatgacagacatctatcccgaattcgactccgaccgcatggcggatcagtactacacggaaatgtacaacagctaagatacagccttgtccctcttacgcaacggccgcctttcttcgggaaaggcggccgttctttttgaaaccggtgtcaaaaatccacaggaagcgggccaagcttacttgggtacttcctcctccccggcctcagccgtcaccttgtctgcgtcccgcttatgatggcgcgcaaaaacattctcctgctgccatacgcgggaaaaagcagacgtgatcagccctgtggaaatagcaatgatggacacggcaataaacataatcaccccggtaaaaatacgccccatgggcgtaataggcaccaggtctccgtacccgaccgtactcaacgtttccacggcaaaccagagcgcgtcaaaaaaggaaccgaatttctcgggctgggcatcgtgctctgcaatataaattcccagggaagtgacgtacagcatgaacaggatcacggagaaaaacagaaaaaactcatcccggatcaggtaaaaagcctttttaaaactggcggcggtttcattaaaccgggccaacttgaaaatagccagtatgcggacaatccgcagggaataaagaatctgccagtccgtcccgaaaaacatgcccaggaacggcacgcagacaataaaatccagaatacccatgccgctgaaaatataagccttccgcggtttggcgcacagcacccgcaggatatactcaaacatgaagaaatagctgatccagtaattcaccttggccgcgatacggcctaccagaggatgaatatccggaatggcattcaacgtgtacagcatgaaccataccagaatcagtaccctgacaatgttctcccagggaccgaaattggcagcgcccagcttggtgcgggtaatttggggcatggcgggaattaggaacgatgggcggccttccactcgtcagccttgaagccgacgcatatctttccattggtaataaaaatggggcgtttaaccagcatgccgttggaagccagcagggctatctgctcatccaggctcatgccggcaagctgatctttcaacttcatgctcttgtaaagcaatccactggtattaaaaaacttcttggcgggcaatccgctcccttcaatccagctccgcagttcctctgccgtgggattctgttccacaatatggcgatcctcataagaaattccctgctcatcaagccacttctttgctttctggcaggtcgtgcatttgggatattcaataaataatgaagacatatccgcacgctagccccgtaaacacaccgggtcaagcggccagcgcagccatcccgacgtcatgacttgattggaaggctgccgatgtttccgccgttgaacacaaaacctgagaacgaaagcccggaatgcgtgcggataccgcagaaattctatattccggaacattaaagcaccatggcgcttcccaactgcgcgatggaaacgggattggcctgacgctcccggagcgcccccgccagagcctgggtagccttctcctccccatgcaccagaatgatattcctcttgggccccccggtcctgtcaaaatactccagcagttctccatggtccgcatggccggaaaaggaatccatctcccgtattctggcccggacaggatattgtttacccaggatgggaacctctttccacccatccataatcttgcggccaagtgtatgttccgcacaatagcctacaaaaagaaccgtatttttcggatcgccgatgttattcgccaggtggtgaagaatgcgccctgcttcacacattcctgaggcggaaataataatagcctgcccgttcattttattcaaagcctgggactcgcccacggaacggatcaaacgcagctgttcaaaacaaaacggatccttctcccggaacaggaaatcataaacctccttattgaaacactccggatgaatgcggaaaatctccgtcgcacccactgccatgggactgtccacatatacgggcagcaagggcagagtgccttcatggtaggccctgttcagcagataaagcagctgctgggtgcgttccaccgcaaaagccggaatataaacgcggcctcctaattccagagcctccttgatagcccggcagaacgtctcgtcatcacgggagggggcctcatggaaacggccgccgtaagtgctctccatcagcaaaatatccacatccggaacagggacgggatcgcgcagtaattcgttatctccccgccccacatccccggaaaacaggaaacgcttcttccgcccgtcttccctgtcctcaatatccaggcacacttgcgcagcgcccagaatatggcccgcatcataaaacgtgagtgtcacccccggaacaacgggaatgggccggtcatacccgatattcacgaactggcgcatgcaccgctccgcatcctgttcggaataagtaggataaacatccggctgatgaataccgcggcgcttgttcatcttattgatgaatgcgcagtcgtgctcctgaatgcgggcggcgtccgccagcatgagctggcaaagatctctggttgcaaatgtactgtaaatatttccctgaaacccctgtttcactaaattgggaagattgccggaatgatcaatatgagcgtgggacagaactaccacatccactcccgccggggaaaaataggggaaatccttattgatatgccatgcctcctcacgccgcccctgatacatgccgcaatccagaagaatccggcacccgttcacctccagcaaatgctgggagcccgtcgtcgttcccgctgcgccgcaaaaatgaattttcattaatacatgtgtacaacaagccagcgggcaacgcaagaaatcaatacctgaagcctttcattcaatatgccctttgaaagacgggaaacatcagccgcaaaatccatgccttttcttttttccaggccataaaaagagaaaaaccaataaactgcaccattcctccttctgtacagtattcctgtgaacatgaaattgcacttctttcccgcccgggttgcggtttccgtaaaaatgcatccgtcaaaaacttccccttcgcaaggcacatgctccatcacgaatgctcgccggaatacccgcatccaggagagccctccggtatcactgccaaaaataaaacctgcaggttattctgaaaacattccgttctgattgcaacccgcctcctgaaaaaagcggccggcaaaaagagtcccgcctaatcttaatgaagcctttcagctaaaatgaacaggacaggaaattcccgccctgttcataatgccgttcaattgcaaaaacttacttgtcctccgttttggagtccgccgtcttttccacctccacgtcaatgggctgggaaagctcgggagaaggccggacctccgttttggaggcggaagcatcactcatggtctccttctcggtcttcagcagttcttcttcaaattcagatttggccttcttgaattctcccaggctcttgcccagtccgcgggcaaattccggaagtttctttgcgccgaacaaaaggaaaacaatcaccagaatggcgataatctccggtgttcccagtccaaaaatagctaacatgttcatcatggagtactacagtatttttaacagatttttttcatgccggatacctcataatacgcttcatgcgtcatcagaggcctcccgttcctgtttctgctgttccgcaagccttctggcggcaaaacgctgaaaacgccagacaataataaatattgccagcaaaaagatgcctgagccgccccacaacagccaaaaagcggcggaagccgccttttcatcccccatttctccagcctggttccaataataataggataaaaccggattccagggcagtgaactgtccggcagaagatggagacgcgccatgcggttcatggccggcaaataggcagcctgggcggatgctttcatcagggaatctccctgagcctcatcaccccgtgtataatatacctgggccagcatgtacatggccttgggatcccctgtagcatccgccacacgccgcagcagcctgtaggcctcatccgcatccagttccccgcccttcccgttctggagcagctccgcggcctttagtgccgcagggaaataaccggcggcggcagcctcacgatacagagccagggcccgggccgcctgtcctgcggaaggagttccctccagcagcatatccgccagggcagccatgctgtacggatccttccattccgcccctttttcaaaccaatggaaggccttttcccggtcagggggcaaatacttgccgtcccggaacattatgcccagttccatcacggctcccaaatctttacgggaggccgctttctcaaaccattctacggccttggccgcatcctgcggcactcccagcccatcccggtacttaaatgccagaaggccttgtgctgtcaggttgccgctttccgctgcctgaagaagatatgggactgacttttccggagaactgtccggaaccagctttcgttcataaacaagggcagcccataacgccgccttggaatcaccgtcatccgcctctttcttccacgtctggagagattttttataataaagggctgccgttgcttcatccttcgatcctcctgctccctgggaagccattacagccacctggtactgtgccgcggcattaccgctgtcagcagcccgggtaaaccagtaccgggccctttccaggttctttgggtacaggcggctgcctgtataaaacagcttgcccaaatccagcatggaatccacatctccgttattggcccttttctctgccaaggaaacatactcggacatccatttggacgtttccgcagcattaccctccacgtcataatgcacagccagctcccgggcggcagctggatccccattcagagctctttcgcggagaccggacaagtaagcctcaaaatttccctccccggcaggctccggagaggaaatattctgagaagcaagaagtggatgctgaacgagggacagtccccacaatccggcaaaaagccaccatctgcaatgtttcttcataccggaacaagtcattcattaatggcccctgtttccgcgggaaaaactgctggaggacctgcctccaaagcccggcttacgaaacccgccttcacgcctctgaaaacctcctccgcggcggtctctctcaaaaccgccttcacggcgttggaaccctccttcacgacggttttccctgaaacctctctcctgatgctggaaacctccttcgcggcggtctctcaaacctccttcgcggcggtctcttccaaaaccgccttcacggcgttggaaccctccttcacgacggttttccctgaaacctctctcctgatgctggaaacctccttcgcggcggtctcttccaaaaccgtcttcacggcgttggaatcctccttcacgacggttttccctgaaacctccctcctgatgctgaaaacctccttcgcggcggtctcttccaaagccgccttcacggcgttggaaccctcctttacgtcgctcttctttgaaaccggcctcgcggcgcagggccccatccccgcggcggccgcggaagccatctccacgacgatgaaaatctccgcggcggtcacgggaacggaagccggaatctccccggaaatatccatcttccttgacttcacgttcatcctccgtctccacaaaacgagtcttcatttccggagtaggttcataagaatccccagcttcaaaatcttccggattaaacacataatcctcatcggaatcaacgcctcttccgccctgctcacccttggcgccccccccggcgacaagctgggaagcacccaggtatttacgctggcggggaggatttttcagtgacagagccacgtccgcatcatccaggaatttccagcccccgggttccaagtcccctccccacagggagccgatgcgcacgcgcaccaacttgcggacacgaaggcccaggcactggaacatttgacgcacctgacgcttcaacccctgttccaaaacaatgcaggcacggcgcgcggaagcgcggcaaacatatttggccttggcatttccctccggaatgcgtactccgcgcaaaaactgcatcagtacggaattatcaaaattctgatctaccgtcacccagtactccttttctatgccgccggtaggatgggaaagaacctgggtcaattcccccttattcgtcataatcagaagaccttcggaatcggcatccagccgtcccacataattcagatggcgcaggcgcggtggcagcaggtcgtaaacagtacctatggctccctgcgcttcgcggctgcacacatacccgcggggcttgttcaacagcaccacaacctcttccataggggtcatatggcggccgtccaccttcacgaaatccttctccgtcaccctcatcccaggcgtatcgataaccttcccgttcacttccacacgtccttccccaatcagcctgtcggccacccggcgggagtcaatgccgcaggaagccaggaatttattaatgcggatacctccgttttcttcggagccatgttgttcttcactcatattggtataatgtccgctatctcagcggatgattttgtattgtttatattacggcaattcacatcctcaaaaagaggagactttcttttgccggaagaaaaaagcctcccggttcatagacatccgagaggcttcctgtattaggaaaatgacttgccgtgcaaactccgccgggaaactctccggagaggataaagacaagcttaagcttcatgcttggtcttcggcaggccgagagggctttggcccttcttccattcgccgcgttccttcagaagcttgacacgttcaaaacgcttcaggacggaacgcttgccgcctacggtaccggttgctttgaggctggaatgcttggacatgatcttgtgtttgtaaaaggttcagaaaaatactttacaccacccttgcagtggcaggcgggattttataacggaaggttccgaacttggcaagagaaatttggcgcaatagccaaatatatcactctgtggcatcccccggatgcgattccagccacttcctccacaaatccggacggttcaggcgcgtacgctccagagacttcccgtgcttccatttttcaatggcggggtggttgccgcccagcaaaatctccggaacagccaggccccggaacacgttcggcttggtataggcgggagcctccagcaaaccgttggaaaaagattcctccacggaagaacgctcatcccccagcacgccgggaatcaggcgcgctacggcgtcaattaccaccacagaggcaatggccccgtttgtgagaatatagtccccgatggacaattccatatccaccagctcttctactacacgatggtccaccccctcataatgaccgcagaggataatgagatggcctccggaggcagccaattccgcggccaatgactggttgaacgtacgaccctgaggagtcatcagcacaacgcgggtttcccgccggcgaagttcctctacggcggcaaagataggttccggcttcagcagcatgccctgcccccctccgcaaaggtaatcgtccgttttgcggtgcttgtccgtcgtccagtcacggatattatggcagcgtatctccaacaatcccctgtcacgggcctttcccagaatgctgccgccaagaggggcttccaccatatccgggaacagggacaaaacgtcaatcgtcagtttggcggccataagaaaaaaacatcagcgttcgcgcttatggccgcgcagcatggcctcaatgaacggatccaggttgccgtccatcacgtcctgaatattgccggactctacgcctgtgcgcaaatctttcaccatttgataaggctggaaaacataggaacggatctggttgccccacccgatgtctcccttctcactgtactggcggtcggcttccgcctgctttttgtcttcctcaatctggtatagcttggcacgcagcatattcatagcctcttccttgttacgaagctggctgcgctcattctggcaggccacgatcacaccggaaggaatatgcgtgatacgcacggcggtttccaccttgttcacgttctggccgcccttgccgccggaacggtaggtatccaccttcaaatccttgtccaggatctcaatattgatggaatcagaaacttccggcgtcgcgtccagggaagcgaaagaagtatgtctcttcccggcggaatcaaagggagaaatgcgcaccaaccggtggatgccgcgttcattcttcaaatatccgtatgcatactctccatccaccttcaatgtcacggaacgaatgccggcgtcatccccgtccgtactctccaaatacgtcacggaaaatccccggcgctcacaccagcggatatacatgcgcaataacatggatgcccagtcacaggcttccgtgccgccggccccggcgtggatggttacataacaggaagcctggtcctgcggtccgttcagcagggtcagcaattcaaaatccgccagagacttctgccatctggcaaactcttccacagcctcccggcccaggtcatcgtcatccgcctcctgagccagctcaatagcagcgtcaatatcctccagacgggacttcagcgcggaaaacgcctccatcctgtgtttcaggggattcacctccgccatcagcgcccgtgcggcattctggtcatcccagaaatccggggcgctcatgcgttcatccaattcggctactcgttgttgaatgccgtccaggtcaaagatagctcccgagctcggaaagacggctatgcaggacagccgtgtcgagcgccgagagatctgcagcgatatggggatccatgcgcgggaacctatcacgaattacctggacggaaaagggcaaaatgccgtttctcccagtcatcctcttttactccgactcgcaccgggccatttccgagaataataacactccgcacgctgaacaaaaccgctcctcttccgcaggaagaacatctaacaggaaatgaatatttccgaaaccaagccctcttccccatttcaatgccccatgggaaaaacagcagacaaaaaccttatttcattcccttaccttacatcaccgtcttctgcccttccccctctttccggaatgtggctcggccatccatatccccggcttcccataagagagcccggagccatgctacttggcggaattttcctctccaccctcaaaagggcggatccggcaggacctgagtttttcaatctcctcaaaagtcatgatgtgttctatctggcaagccacttcattggcgcgttcttccgggagggccaattcctcccgcaggaaatcaaacagaataccgtggctgacaataattttcccggcaattctgcggccttggggagtcagcttgacgggagcatactgcgtatactccaccagtcccatatccgccagttgcttgacggcagatgtaacggaaggcatctttaccttaagcatctctgcaatatccctcacctgggccgtcccgttcttttcagacagcaacccgatagcttccagataatcctcattgctcttggtcagctccaacatggtataaaatgaaagttaatactttagtggaaactaactcaagattttttccagacttctttggaatgagaaaaaaaccgccgcgaatatgaccattcgcggcggttaaattaatcagcgtaatacaaaaacgggcttacttctcttcagaagggctccactcttcgttttcacgggtagccagattgaaggcgtgttccagacccaccatatcgctgctcgggcggagggcttcaaaggaagcggtttcgcggcggagctgttcggtgtcgtaattgacggccttgatggaaaggccgatacggcgttcgatgctgtccactttgatcacgcgggcagtgatttcatcacccaccttgatcacatccttcacgcgttccacatggtcttcgctcaactgggagatatgaatcaggccatcaatatcgccgtccagattcacaaaggcgccgaagctggcaatcttggccacctggccagtcaccatatcgcccaccttgaagcggtcattgatggattcccacggatcggactcaagctgcttgataccaagggagacgcgctgatcctccttcttgatttccaaaacgatggcttccacttcgtcgcccttcttgagaacttcggagggatgattgatcttgcgggtccagctcatatcggacacgtggatcatgccgtcgatgccttcttccagtcccacaaaagcgccgtagggagtaaggttgcgaacctggcccttgatgacggtaccaatcgggaaacgggattcgatatccgcccagggattgtcttccaactggcggacaccgagggaaatcttctgttccttcacagaaatggaaagaaccacggcttcgatttcctggtccagcttcaatacatcgctcggacgggtgattctcttgacccaggacaattcggaaacgtgcaccaggccttccacgcccttttccaattccacaaaggcgccgtaaggcaggagcttggtcacgcggcccttgacatgggaattgatcgggtatttgcgttcgatatccgcccaggggttgtctgtcatctgcttcaggcccagggaaacgcgttccttttcgcgatccacttccagaatcacgacttccagggactgaccgatatggagcatttcgctcggatggttcacgcggccccagctcatatccgtgatatggagcaggccgtccatgccgcggaggtcgacaaaagcgccgaagtccgtgatattcttcacgataccttccaccttgtcgccttccttgacggtttcaaggaagcgctggcgctggtcggcgcgttcggcttcaatcacctcacggcgggaaaggacgatatttttacggtcgtcatttaccttgacgatcttgaattcgtaaacctttccaacatactcgttcaggtcgcgaggaggaataatatccacctgggaaccgggcaggaaagcttccacgccaacattgaccataagaccgcccttgacgacgctcttcactttacccttaaccaggccgccatcgcggtacacgcccacgatcttatcccagttctgcttatgggcggccttttccttggaaaggacgacgatgccttcgtcgttttcgaggcgttccaaaaggacttcaatttggtcccccacttcgatttcctcgtcttcaaactcggaaatggaaatagcgccttcggacttgtagccgatgtccaccaaaacgacttggggacggatttcctggatggttccggtaacaatggaaccttcacgcaattcgcggaacttgctgtcaataagttccgccagttcagttgtgctcatttaaatggttgatgagttagtattaacgatctttctcatggccccttattgaccggcgggcaatcggggcgccttcccccgccgggcgaaaaatcggttgctttcaatatcagtttcacacaagaactcaaggcttttcttgaaaaactcctcccgattttttacggaacctgtggagcccctctggacggcggcagaaaacgagcgcacaaaaaccttgtagcacttccgtcccatgttaaattccggctaatgggaaaatgcaggaatacctgcatctatcaaccactcctgccgcaaaaccatgaaaaaaaacctcctttacctgctcgcagcggggctgtccggaacagccttccttcacgccgcggataccgtcaaactggaccagccggacctggaacggggggctccgatcatgaaagccctgtccgaccgtcaatccattcggagcttttctgaaaaagcgctatcccaaaaagatttatcagacctgctctgggcggccaatggcatcaaccgtcaggaatccggcaaacgtacagccccgtccgccatgaaccgccaggacgttaaaatttatatatgcactaaaaacgcctcctacctctatgaccacaaggcccacgccatgattcccgtaaacgatggggacgtgcgcccggcggatgcccccatatgtctcattcttgtaacggatacggcggaaccctgggctgccatggacgccggcattgtctcccagaacatctccctgttctgctccgggacgggactggctacctatccgcgcgccagcatgaacaaggatgccttggcaaaggccctgaaactaacctctccccaaacacccatgctctgtcatccggtaggatataaaaaataactacttccggctacattctccggacagtccggaaaagaaaccatcagaaatggaaataaattccacaacaggcggaattatggttccggcaaaatatccatgtagatgccgggagagctcccttcaataggcatcgcgcccacagcccgggcataaaaatcagccggaccaaccccgccgatgacaccgtatgcataccccagctcccgcaaacctttcagggcggaaaccaatagcacggtgcctaatccgcttctgcgcacctcttccgccactcccatggggcccaaaaaaccgcgagccgttacatcgtaacaggcaaaaccaagaatcttcttctcccgtgtggcaatataacaggaaatgggctggcggccaaacgcgactttcgcctcacttacccacttgggagaaaaattccggccaacccagtcagctaccaaatgacgttcgtaagcacccggacggcgaatcaaaaaaccttcccgctccagcctcctcaggtcttcttcaatatcgggcaaatcatacagccgcaccagcatatccatcataaccccggcaccgtatcacaactaagtgccgtggcgaataaaaaaaactggacaaacccatctttcaaccttagacttcgccgcaccacaaacaacgagctgtagcgcaggctggtagcgcgcttcgttcgggacgaagaggtcgcaggttcgaatcctgtcagctcgaccaatttccaagccgcctccgggcggctttttgattacttatttactgatataaaacaattttactcattaataactctgcacttcccctattttgcgccaaggcaaataaacagcatcatactgattgaatttaccctcctcacaggaacaaaatcaaacgggcaaatcttctcaattaagcctggaggatgtcgggggtatttaccgatgcagaggaaaaattatctatgcccaattctcacccctgtgccaggcagcatcacagcctctgcggaagtactctataacatccccctaaaaataagagaatgaacctcctccacaaaaaagccccgttcatatttcatgaacggggatgagtcaaacgaagtcgaagcagggagataaaaccgggttacttgccggattccggtttgaaacgagctgcttccgattcggcggtgatttttgcaggctcgatatgcaggagctttttcatggcacggcccaggtcgctctccgtcatcggaaaatatctgacgtggtcgcccaggctgtaggaatccagtccataaatgttgtcagccggagtaaaatcttccggtgtgttcagcagtttttttacctcctttgaagacgcaaggacataactcagattacaactggaatacaattccgttttaggagcgcttcccttgggaagcttattggcgtgcccgttccacttgaccagagcttctacaggaatatctccccgcagcgactgaacgacgcgggcatagtgcgtcgttccctggtcagtggagactattttgtaaatgataacagacaggaccacatcgcttttttctaaatttcgggctgtacccctgagaaaactatcctgttctacttcggcctgcgtagcaacatgggaataacggtctggctctccaagggctacggttgaaagtaatcctgaaaacagaacgcaaagaaaagaaacatacttcatatgtatatattagatactgattttttggtttatattcaataaaaatagggcaaacacaaaaaatgtccaccctatgaatatattatttaatatcagttattaatcatccagtgtcgatctttggagcagccacacggggccggaaataaaactgcccacgccaatgttatctcccgaacacattcccacatgcagactatcgccaaatacgataatgtctccagcctggggagtgttgtacccattttctccatcatccggataatcaggagtccccagcaggatacggagataaaccgccatttgagctgcgctgatgataatgtgctttttaccccccaacgcctgggaattaccctttgctccaatattattggctcccggagctccattaaggtcaataccataactactaagagcaatgctcagacgcaaggcgcaactgttaatgtaattggcatctcccgaaacgtggctatcgttcagccatcctccaatatagttccacacatcatctgtagtcatggtgggataatccactacattatagcatcccagtagacgttgtgcattggcaatattccaaagattttttggagcatcgattccccaaaattccagttcggaatctcccatcttgggaacaaactcctccgcattggggtaaggagcaatttcttccgggacggcaaggttctcatgatgcagtttcgcatcgtggaagccctttttaagtttcttgcttccagaaacggatgtggacgaatgtgagccagtcaattccgctaccttttcaccattgatttccagatagccgttgtcgtcaatctgaatcgtgaaattataggttccatcttccggaacgcagatatatccttcccagtcatgtccccggtttcttccgtcttgtgccatccaatcttgggggactctttcttcgttaccttgtagcggcggttgttttccacatccaacgggtggaacggttttgtagatatagccataatattatgtttcgtatcgtttactactgaatattcagttcatggaaaccttgaaagatttctcgctccctatcaacacgtttaacgcgtaatccaaccctcattcggaacgtgaaagaaaaggttaaaacggcacgacaatcaagtggaaaacaaaggatttgaaaagggcacaagaaacacaatcattgattatcaatagttacatttcaaattttcttcattcgggacgaagagaccgctggttcgaatcctgtcctttcgattattttctaacaacctcttccgaacggttattttattttccggtaaaatcacttcccctgtaaaagccagtcagaaacccactagcagctgattcttctatctgaaaaaagcccctgctgggatactttatcagtcatccgtcaaattcccattgccccgcgcatgtttctttctctaaaatacaggtaatgagtgaatacttcctgaaacttcccggcgattcccagccgagagcctattccgaatacgaagtccgtgaatttctgggacagggcgtgatcgactcaaaaacgcttacctggaaacagggcatggaaggatggcagcccgtagcccaagttcttcctccgatgtcacctgtatgggaggaaacacaggatcaggagggcaaagatcagccagaagagcagcagtaccgcttgcgttatcctctaaacgggctagccaaattatccattttggcatgtttcgtattgctgcccttcatgctctggagcagctggattgttttttccaacaatgtcgtcaattatgaagaaattcagacactcatccagcagaatatggttcacatgccatcttttgcagtaccattggtcttcttcctcagcatcctgttcattccatccctgcttattcagctgatctggctgtaccgggcatctgccaatattcaggaatttcaagttcagggaattcggttcactccattccttagcgttcttctaagctgtatgccggtagtcggtatggtgctcaatgccctggttcttcaggaaatatataaggcatccaaaaacccggcagaatggatgttgcaaacaccctcccgttccctgcgcttatatcttctggtgactacggctctaactctgtgcacccttttccctttcggggcggaacattacgtgacggcctttctgctcaccggcgtactgatgacggcagccagcatcctgtggctggtctgtgtcctgcaaatcaccagaaaacaggaggaactggtctccaaaaatcaaaactcccgttcctgatcgaaaaaaccgtaatcagcgtttttccttttcttccgtgggcggctgactgtctgggaggattttatccaaagcttccatgctgttatccttatacagattctccagcagtttttcccaccccgccgccatctgaacctgtttcaaggcaataataggatcaggcatcatcatttccgggtcgggagcatattgctttagcacctcatccggattgattctgttaaacgttgtcttcccatagcccggcattcccgcctcatgagcgatggattcaatcatctcaaaatgcaaatgcgccaaataattgccgtgcgcagttccgactgagccgatttgctctccgcgtcccaccagagtccccagcggaatatcgctgacggttttcaaatgggcatacagactctgcacaaaacgcccgtccggcaagcggtgcagcagcacgacaacattgccccaatctggagaaggttctcctgcataaatcagcaatccgcggccggcggcccgcacgggcagtccctcatccgtgttttctcctcctattccatttaaatcctgtcctgcatgccttcccttacgggcggcattcatatcccccacaccctgggcaacataggtaaacgctccattctcatctccgaggggcgatgtaaacacatcggccagaggcgcctttgccagctcctggggcgtcaacaaaaccatccggtaatctacaggaaccggagcagaccgcggaatgtcttcgtcataaatattatggtgcatcccggcctccggaacggcggcatatttcgtcttgtaccaggcaaatgccgtaatcaagacacaggctgttcccaaaagccccataatgacgcgggatgtcgtcttatctatcatcgtgccgactctatacccacggaaccggatttacaatcacaagatagtcaggccagcgtctgcggaaatttttccatccacaatttgtgcgccgcacggatatcttctgaggaaacacggctggagagctcccatacgagcggaaccccatgcgggaaaaaaggaagaaggcgttcaaagggaactactcctcccagcaggggaacctgatgatcccgcgcgggccatttgacgtcgttcacatgtcctccaatcaaatgggaggacattcggcgaagaaactgctcatgatttaatataagcaaattatgctttctttgaatatgcccgaaatcatgccagtaaccgataaagggattgtctccaaactccttcatcaacaaattcatctcatcctcactcggcacctgctcataatggctgcgcccttcaatgcccagcttgacgccaaattgtccggcttgcggaaggagctgccggagagcttcacgcgcccgttccagataaacgggagccaggcggttgcggcggcgtacaaattcgcccttggtgccggcaaacgattccgttcccaccattccctgacgcgccaggttttgcaaatgagccgtatccgtgcgtttcgccaagggttccaccgttcccatatgcaacacgatatatccggcccccagtgctgcgccctgttcaatagactttttcgtcaattcaatagccttggaacgcacctgcagcaaatccgccgtaaaaggcctgctgtctggagaatcccccacttcgtcaatcggagcggggaaaaaattatgcaccccggccacctgcacctttccggcttttaccgccctcatgataccggggagaagggataacttgatgccgtgggaaagttccacatggtcaaaacccaaagaaagaatctcatcaatcatttcttccccgtcctgatgacggtgggaattccagcacgtagaaaataccagcataaaaaaatcaattgttatgagctgatggagccgggttccgtgtagcaatcttccatccactccttgacagcggcagtcatgcttccagcgacatccgcacgaggtttgacgaaagccggaataaaccacggaaatgcgcccaccagatcatgaatcaccacaacatcgccatcacatgtatgggagccggacccaatacccaacgtgggaatggaagaatgtacggtaacttgtcgggccgcatgaggcgttacgccctccacaaccacagcacaagcccccgcctctgccacagcctccacatcccttaccaaggcttcctcctccgcggaggatttccctttgatcttatatcctccctcctccagcactttctgcggcaggaggccgatatgacccactacgggaataccggcctccacaatagcacggatatttcctgcctgggctgcccccccttccagcttgacagcatctgctccagccaaaaacaatttctttgcggattgcacggcctgttccaccgtatcataagaatgtatgggcatatctcccactagcagggcgttcttcactccgcgcgcagtagcttccacatgatgaagcatatgatccagcgtcacatgagtggtatccggaaagcccaaaaccaccatccccaaggaatcccctaccagcacaatatctacgccggcctcatccaaaagacggcctgtaggatagtcataagcagtaaccagagtcacatgccgcctgttcttgcaggcgcggattcgttccgctttctcaaaagattgattcatggcgttcaataaacatgcaaatttaccagcgttccgataccaggagcggatcagcctcatccgtatccaattccgccaacaggcaggcaaccgttttatgctggcgcggcaggataagctccggcctgatatcggaaagaggttttaaaacaaatttcctcaaatgggctctgggatgggggagaatcagacgaggaggatcattgaccaccatgtcgcccacatagataatatccacatccgccgtgcgaggttcacagcgaatcccggaacgaatacgccccagaacccgttctataccctggcaatgcacaagcaattcctccaccgtacctggccaggtaaattccaccacggcattcaaataatcatccgcaccgtgcggacatccctgaggactggtggcatacagggaggattgcaaaaaagggtcatcagacaggctcatctgcaacaaatgatccctggcctgaaccatcaggctgtttttatccccaagattgaaccccagtgcaatgcctgctctcttcatcagcaaaaaacatcgtggccgttccggaaaagaagaacggccacgatgccgaaaaagttataattgggacaaccccagaacgtcttccatggtatacagacccggttccctgccttggagccagagagccgcacgaactgctccggaggcaaatgtcatacggctggacgccttatgggtaagttccagccgttcaccatcggaagcaaatattacagtatggtcccccaccacatcccctccccgcagggaatgcatgcctatttctttggcgggtcgaggccctaccaacccttcacggccaaaaaccacactatcttcataattcctgtcaatggcgccggacaggatttccgccagtgtccgggcagtaccggaaggagcatcaattttgtgacggtgatgcatctccattacctctatatcgcagctgcctcccagaatctgtgcagccttgcgcgtcagccagaacagggcgttcacccctacggaataattggaagcgaacacaatcggaatggatgccgcagcgtccacgatctcctggcgttccagctccgtatgccccgtagtgccaatcaccagaggtttgttattggcaacagcttccgccagcagagtgctggtgaaagcgtgatgggaaaaatcaatggctacgtcgcatttggcgagggcgggataaagctcctgtccctgatcatgagtagaacccacgcaagtatccggattctgcgtcaccgcctcttgaatagtttggcccatgcggcccgaaatgcctgtaacaagaatggaaatcatatcactaaaatgttaaagaatattgaaacgctgaagaagagcggaaagctgagcttccttctcttccgccaatggaaccagcggaagacgtatgccgggctgtatatctcccctcatcgccaaagccgccttgatcggaacaggattggaatccagagtcattagccctttcatcaacggataaaatttcttctggagggaaagcatttcccccatatcctgattcaggccagctttgacaatggaattcatgatgcccggaaccagattggatgttacggaaaccaatccgctggcgccacaggccataaaaggcaccgtcagaccgtcatcgccacacagaacagtgaaattttccggaaccacctgcatcagctggttcacgcggtccacattgccgccggcctctttcacacaaacaatatgcgggcaatccttcgccagacggctgattgtttccacactgatttcaatcccgcaacgccccggaatgctgtacagcataatcggcagacgggtagcgtccgcaatagccttgaaatgggcataaactccatcctgagaaggtttattgtaataggggcacacctggagcgttccgtctactcccatcttttccgcttcctgggtcatatggatagcttctgcggtggaattagcgcccgttcccgcaataacctgaatacggccagccgcgctctccacggccaattctattaccctcaagtgttcttttacagtcaaggtgggggattctcccgtggtaccgacagccacaatgccggccacaccggcagctatctgggcttccacaagcattctaaaagcctcttcatcgacccggttgccggcaaacggagtcacaattgctgtataaagaccttgaaacttcataaccttacttggaaatatactatcttaacagacactttttgtcacgacagaatacagaaatatggcacgcctgtcaggcatcctgaaataccattcgtgaacaaatggagcaaaactccaggcaggaattaaacagggacaggaatgattccggccgcctgccgggccgccaggcagctttccttccattgaccacgatatattcccggtgaatatggcgaccttcgttcccacataaaaacaacgcagccgcacaggcggaagaagccaatcgagactgggaaacataccgaaataccggacggtgaattacgatctggctcattctgacatctctccggttcaggcaattttccaagcccgcgatatcttccacccatactcccttttttccagaacgggaaaccatattcacaatcatggccccagaaacaaaggcatgttccagcaaaacggacagacggacacgggaagaacaactcagtccctgcacctcgactgaggcatcttcacaaataatcaaataatcaacacgtccataaagagtatgtaccagaccagcaaaagaagccaaatcggaagaatggttcaggcggcctgacatgaccaggtggctgctgcccggaagacaatcaacgatatggcaagattcttcaccggcctcatgaagcatggcaaccacagttccctgacaggcaaatgccttggctgccaaatatcctatattgccggcgttgcccagaatgacgaccacaggtttctgaatgacttgggatttcatatgccgccattctgacgaaagagtgtaatccgtcaataccccacacatacttaagtcattaagaaagaaaaaggaatagttaagaaaaaattatatggccacgacatcttacaagaaggaaactaactaagagaatgtaggggggagaagaacgggaccgagcaagaaaagaacaggccccgcgagtcaagtgactggcggggcctgatggaaaaaaatcccggcggcgacctactcttgcgggacctatcgtccgactaccattggcgcggcagcgtttcacttccgggttcggaacgggaccgggtgggaccactgcgctctggccaccgggcttcagggggaagaggtgattttttcttcatcctgcctgcccgggagccctgcttttttgggggcttctgagtgagggatttttttcagggtatgtgtgtggcggctaagaagatttccgtcctttgtgtggggagggattcagcgtaaactgacatctgcgtggctggtggttgatgaacatgcacaggtaaatgagacaagagcaagttgtcattcacgacggggagtgatgtaatatgatgaagtcaattggtaattagtatcgctcggctcaatacattgctacacttacacctgcgacctatcaacgtggtggtcttccacgaacctgtagggaaaactcatcttgggaagggcttggcgcttagatgctttcagcgcttatcccgtccgcacttagctactcggccatgcacttgacagtacaaccgatgcaccagtggtgcgtcagacccggtcctctcgtactaaggtctgaacccctcaattttccaacgcccacagaggatagaggaccgaactgtctcgcgacgttctgaacccagctcgcgtgccgctttaaccggcgaacagccggacccttgggaccttctccagccccaggatgcgacgagccgacatcgaggtgccaaaccacgccgtcgatatgaactcttgggcgtgatcagcctgttatccctaaggtaccttttatccgttgagcgacggcaattccactttctaccgccggatcacttgggcctgctttcgcatctgctcgacttgttggtctcacagttaggcgggcttatgcccatgcactcgacacccggttgccaaccgggctgagcccaccttcgcgctcctccgttactctttgggaggataccgccccagtaaaactgaccggctgacacggtcctctggccggattcacggctcagggttagatcctccagtttcaaagggtggtgtctcattgatgactcggacgccccctaaagggcgtcttcagcgtctcccacttactctgagcattaaaaccgaagaaacaatgacagcttacagttaaggtctatagggtctttccgtccttctgcgggtaggcggcatcttcaccgccactacaatttcactgagcgcctggttgagacagtgcccaactcgtttcacgattcgtgcaggtcggaacttacccgacaaggaatttcgctaccttaggaccgttatagttacggccgacattcaccgggacttgggtttagagcttcgccttgcggctaaccccttgccttaatctttcggcattggtcacgtgtcacaccctatacttcgacttgcgtctttgcagagtgctgtgtttttgataaacagtcggttgggccatttctctgcggcctgcatcgctgcaggcaccccttcttccgaagttacggggctaatttgccgagttccttaaccaggtttcactcttacgccttggtatattctacccacccacctgtgtcggtttgcggtacgggtcgcttagcatacgctggggcttttcttggcactcgatccaatgatgcgctgagtccgtggactcaactcggaattcaataacctagtcatcttttctcatgcgtccccccagtttaagggttgcgagctcaggattattaacctgatgtccatcgcctacgcctctcggcctcggcttaggtcccggctaacccagggacgaaacacgttgccctggaaacctcgggtttacggcggccggggatttcacccggcttaacgttactcatgtctgcatactcacttgcatgtgctccagggtcagtcgccatcgcccttcgacgcgcatgcaacgctcttctaccactctgccttgcggcaaagtccagagcttcggtataacgcttgatcgccaatcattttcggcgcaggatcactcgatgagtaagctattacgcattttttaaatggtggctgcttctaagccaacatcctcactgtctgtgtaatcccacatcctttccactgagcgttatttaggcaccttagctgctggtctgggttgtttccctctcgacaatgaagcttatcccccactgtctcactgccacgttccattgcacggtattcggagtttgataaggtttggtaagcgggtgtgccccctagccttgtcagtgctctacccccgcgcatcagcacgtgacgctgcacctaaatgcatttcgaagagaaccagctatcacggggtttgattagcctttcactcctaccctcagctcatcagagaacttttcaacgttcacctgttcattcctccacatggttttacccatgcttcaacctggccaagggtaggtcacctccgcttcgggtccagtacctgcgacttattgcgccctgttcggacttgctttcgctgcgactccgggccggaagcccttagtcttgccacaaacactgactcgcagactcattaaacaaaaggcacgccatcgcagattgctctgctctgacactttgtagacatacggtttcaggttctatttcactccgctcacagcggttcttttcacctttccctcgcggtacttgttcactatcggtcgccaactagtatttagccttgcgcggtggtccgcgcgggttcatacatcgttccacgtgtgatgtattactcaggataccactaattcccactctggatttcgtctacagggctttcaccttctccggccagcctttccaggctgttctactatccagtatggtcgaatatgacgtggtcctacaaccccgaaggaataccttcggtttgggctccatccgctttcgctcgccactacttacggaatcgatttctctttcttttcctccgcttactgagatgtttcacttcagcgggtttcgcgtttcataccctatgtattcaggtatgaacgatcgagtattgcctcgatcaggttaccccattcggatatccccggatcatcgcttgcttgcagcttcccgaggcttttcgcagcttgccgcgtccttcttcgcctgttggcaccaaggcattcaccgtacgcccttacttacttcatcatattgcaaaagctgttaccacttccacaataccacaaagccctttcgtgacttactgtattgtctcattgcttggtatgcatgtttatcttgtgttttatagttgttgttcaactacccactttgttggaaagcgattgcttctcagcaatcgttttctttgccacgcagatgtcaattttcgctttccctcaataatcgattttgttggtgggcctgacaggacttgaacctgtgaccccgcgcttatcaagcgcgtgctctaaccaactgagctacaggcccggctttgggtctctttcccgaaactggtggaggcacggggactcgaaccccggacatccagcttgcaaagctggcgctctaccaactgagctatacccccagttgcggttctcggtgaaaaaaggtcgtcacgcacgtcgtgccaggtttcgctccaggcgtctggctgtttacacatctttggttcgttgcgggccctcgcgggttccgctctctctcccctcgggaagagatccgacctgtgcacttccgtgcacttgctccatagaaaggaggtgatccagccgcaggttcccctacggctaccttgttacgacttcatcccagttaccagtctcaccttaggaccctgcctccttgcggttggcttcagatacttcgggtgcgaccggcttccatgatgtgacgggcggtgtgtacaagacccgggaacgtattcacggcgccgtagctgatgcgccattactagcgattccggcttcgtgtaggcgggttgcagcctacagtccgaactgggcccagtttttaggattccctccgcctcgcggcttcggccccctctgtactgggcattgtagtacgtgtgcagccctgggcataagggccatactgacctgacgtcgtccccaccttcctcccagttgatctgggcagtctcgccagagtccccaccttcacgtgctggtaactggcaacaggggttgcgctcgttgctggacttaaccaaacatctcacgacacgagctgacgacggccatgcagcacctgtgtaacgcctccgaagagtcgcatgctttcacatgttgttcattacatgtcaagcccaggtaaggttcttcgcgttgcatcgaattaagccacatactccaccgcttgtgcgggtccccgtcaatttctttgagttttaatcttgcgaccgtactccccaggcggcacgcttaacgcgttagctccggcacgcagggggtcgattccccgcacaccaagcgtgcaccgtttactgccaggactacaggggtatctaatccctttcgctcccctggccttcgtgcctcagcgtcagttaatgtccaggaacccgccttcgccacgagtgttcctctcgatatctacgcatttcactgctacaccgagaattccggttccccctccattactctagtctcgcagtatcatgtgccgtccgcgggttgagcccgcgcctttcacacacgacttacgaaacagcctacgcacgctttacgcccagtgattccgaacaacgcttgagacctctgtattaccgcggctgctggcacagagttagccgtctcttcctcttgtggtactatctttttaatttgctcccacatgacaggggtttacaatccgaagaccttcattcccccacgcggcgtcgcaccatcagggtttcccccattgtgaatgattctcgactgctgccacccgtaggtgtctggatagtgtctcagttccagtgtggccggacatcctctcagaccggctacccgtcatcgccttggtgagccgttacctcaccaactaactaataggccgcgagcccatccccaagcgcattgctgctttaatctttcgatactatgcggtattaatcccagtttcccagggctatcccgctctcgggggcaggttactcacgtgttactcacccgtgcgccactagagaattattagcaagctagcaattctcccgttcgacttgcatgtcttatccacgccgccagcgttcgttctgagccagaatcaaactctccatcaaattaatttttgaaattgctggatcaaatggaatcttgcgatttcatttgcgccatgcttcagccagctcttccttcaagttgtgtctcttgaaggcctcttcgctccgcctcgcacggcgcgcgtcacgaccttttttctttccccttgcttctaccaaaccacccctctcagagctaggtcgctccttcgggcttttacccctcaggcacctctcggcaccctcggaaaaccctcggcggtttcggtagtcattcccttgaaatcttcttatcgcaaccccttccggggttttctccgggtggccggctccagccgcttccagcgctcttccgagcctttcagccgccgggcttttcatcccgtcgccgtgttggcgtgccgagaaatctatcataccacacctttttgtcaatttttttcgtcctcttttttgcgatttgttgagatcaaaaacaaaacatatctgattatcaacgtattacatttttatttttttctaataaaaaagcctctttcaccacgaaagaggcctaaacgtttcagaagtcctaagtttctctctactttttgcctcctccactctttttcttcatgactgcgtattgatgaaccagaggcagttcccggagggcgtttgcagcatccttccttgcctggtcataatcttttttctccattgccatattcatcatcacttcatagcaggcggcattgtatccgccatcatccctcgtattagaatccctcataatctggagagcgcgccgagccgccttatagctgtatttacgcatttcctccgagccgttaaggattttcaggatataggaagcaagcgaatcttcccgggggaaacgctccaagacgtggtcaaagatatcaaccattttccgataatttttctccttccaagccttttccgcccgcacttccgccacagtagacgcaaaccatccgttatcggaaaactgccctgcattttcctcaatcaacttctggtattcatcaaatttcttttcccgcctcaattcaaaggatttttttatgacagcatacatggcctgctggcgggccttccgtttcgcatcttcttccgcaaacctgtttttgtcaaaagagtccaatctggcagtttccgccacccattcgggcatcttcttaatttctccagcccacagcaatgttccgtcacgaacgacgaccgcggcgggaaatgagtcaagtttgagcaaatcacaaaattcaatgaccgaacgatccgatggaataccgacaggataaggagtccatccttccggcccggataaatagtcccgcatctgtttttccgccgacggattgagccccaataccacggcttttactcccggatggtctaagagcccgtgttttttaagaacggcatcaagagctcttccaggagctgtttctccaagtatattattgtggcctctccagaagctgatgaatacggttttgccgacaggaagtcctgttagaccgggatgattgaaccattttaatttgctgaacaggggagtgtactgtttgtcttcctgcactactcccatttcctgcatcttcctcggaggttccggttttatttcagcaaccgcctgatttacaagattctgaaaggattccttattgcctgaaagctgctgcaacttcgtccaggctttgctgatggacgttaaggaaagcgccttttccatatcctgcaacgcttcttccatatttccctgccgttccctaagttccgccatcagtttccatggcaaggaagcttccttgttattccttctggagatttcaatacaacggttcagacatctttccaccagggcggcatccatttttccggcaggcacggattttccatttagaagcgttcccgccacatcaatctgtacacggtaattgtccggatactctttgcacaggtcatccagtacggcctgtgcttcctggaatttttccaattccgccaagactctgaatggaaccattttcagttgaatgatctgatcctgctgaaactgtcccgaatcctgaatttgccttaaaaaggcctgcgcttccccctttcctcccttccgggcaagctctcccgttctctcagaaacctggcggtagagcttccatgcacgggcgtttgcgccgggattatcccccggaagagatgctgcagaaaaatcaggcttcaacatggcccgcatcatttcttcagaaagttttccaggatgccctctccaaataagcttgccgtttttaacggcaaaagcatgggggatgccgttaacccccattggagacagccatttatccctggtttttttcccatccacatccacggccatggcataagtaaggggcgatggacggtttcttaaaaattctttcagagattccggagatttcctgtccatgacgttaactccgataacctgcatatgaggattattcttaaatgcctgatgcaattgttccatatggggcatagcagccaggcacgggccacaccaggtagcccaaaattcaaaaatgtacactttgtccttttcccattcctttaccggagttccctgtatccatacatccggcaaaccatccagagcaagtgatggaagggcatcctccgaagcaaccgttttgttttcctttttctcagaagaagctgcgtgcaatggcattccggcagacaccgcaaagatcatggaacaccctaaaaccaacagagaggaatttaacatggtaacacggtactatcgtaaccttctgcgtcaagccaatagaaaaagaaaaggaaagatagaagagccgttatcgtgttctttccaccagaatggaatacaaaataatcccaaaaagaaaagatattaatcatggagtttttcatatggaataagaaaacaaacacgctcagcatccacacttttttgagtttcattggatttaggaaaaatgatttacctttttggatacacaaagacaatattattttctaaaatagaaaatatgccagaaatggcttgccagatttttctgaatgcgaaaaatgcgctcatggatgaaatgaagtccagtatcagaaagtttctcgctcttacgaaaatgacccgggacgaatttgccgacctttgcggcgtcagcaaaagtcaggtcgataaatggctttccactgttccaattccccgtgccagacaacgccttatcatcagaatcatgaaggaagagtacgccaaacaggcacgcctggctcaaacaaaaaatccgaacagcatccacgttcccgttactcctcaaaagtatgaaaagttcaggaatgaagctgaacgccatggcctgaccgttccggaatgggcgagtgaagcactggatgctctttccagcatcaaaagcagaagctgaaaagaggatccgatattccggatcgattccagagaaagagaaaatagtgttgttatcgcctcttccctatcttttctttcattacaaatctgcacaaattcatgtctgacgacgatatacgcattttggtgaaggagtggctgcaaagccaaaaccgcaagtcctatcaattggcggaggagataggcatccggccgcaaactttttacgcacagatgagcgttcgtaaaatatcggccaataccaaaaaagcgctttcccgcatcattccaggcctggtttccgattcagatctgaatccaccttccaatacggaagaatgtgacccgaaaaaactcagaatcaaggaatggctccgggctcacggcaaaacacgccgatggcttgcggaacaatgccgcgtttccgtccgcaccgtacatacctggtttactgcacgcggtaacattcctgtcacccaatatctctttatcgataagctgatgagtgaaggcgagtcgtggaaagttcagcttcccaataccattcccgtgaattttccggaaacggaaatggaaattgttcacaaattccagaaactacatccggacatagatcttcctatgtacggcatgcataaaatcctggagttatgcgttaatgtactcactcaggatgaatattcaaagacgtctccatactcccgtattaccaataccggagagattcgccaccgccggataaaataagaattattcaaaagttcaattttccttttccacgggagcatttctgaaaatgcactgtttgcatacctatgccggtatttttctaaaacatcgcaggttctccgccagcctggccttccgggccattcttcttaatctttcacggaaccctttcatttttttgttccttttatcacgacggccacagactatcctatctctcaacacagagaaaaaatcttcagccacattacatcatccctccagtttcgaaaatcaatcactattgattggaaaaacagtccgaaccatgcgtaatagtgcttctatgcagcctgttcaccagagttaaccatacttaccttgcctctccatttttaagaaagccggcttttggtgaaaaagctcttatcgcatgaaaaaccccgtattcttaaaaagaatacggggttaaaaaatggcacgtccaactggattcgaaccagtgacccactgcttagaaggcagttgctctatccaactgagctatggacgcatgatgcggcaaaagagtaacagagttcatctcaacttggcaagcccggatctttgaaaagcgcgctttaagcgccggagcagcggtcatgcgtaaaaggtatgtccaccagggtcgctccaaacttccgcaccagaggctcctgacaagaaaacatgcgttcccgttcctccggttccgtatctatatatccgtgcagatgcagaagaccatgcaccatgtaccggaaaagttctctgaaaacaggttctctgaattccgaagcctgccggatagcggtatcaaagctgacgatgatctctcctattccgtctccatgcggaaaagtaatgacatccgtcgccgtcggatcattcaaaaaacgggcatgcacatcccggatgacgtcatcggaaaccacgctgatttctacttcatccaatccggaaagtacggggacaggaccttcaggcaacgccaacacggacggaagacaactctccaaggctccaatcagggcatccgtaacggatgaactgaacctcccctcccccaaatgattgtagagttcaagattcggtttcattttcctccgcatccgctccgttcttcatctccgtttccgtggattttccctcttgaagggttccggcatcgggcaactccatgatttcaggaacggctttgccttcaccttcctttttcaccgctttctcttctttttccctgacggacacatcagagaaagcatttttctcaatttttgcctccggattgtgagaaggataggcaatgcggttgtggtggatgcttttcagcgtcttaatgaaactgttgcgaatctttttgagatctccgaaggtaaggccgcaatcgtccaaatggccgtccaccacccgttgcttcaaaagttcatccacccttttctgcatttcctcacaggaaattttacccatggagcgcgtggcgctttccacgatgtccgccaggctgacgattcccgtttccttgctctgcgggttgggccccttgtaacggaagttggattccaccacctccgggacgtcatccggagacgccaggccgctttccacgcggctcagaatctcatcacggtattgaagggctttccggtaaaagaagtaagccagtgacgtgccgtgatgctgctctataacgtccaccaaaggacgcggaaggttgttctccctggccaatgccaccccgtcctgaacgtggtcgatgatgatacgggcgctcatgctgggcgtcagctcatcatggggattggggccgtccatgatattttcaatgaaataaagggggttttgcatcttgccaatgtcatggtagtaggcctccacccggcattcaatgggattggccccaatggcttccgccgcagcttccgccagctgggcaaccatcaggcaatggtgaaaggttcccggagcttccatttgcagccttttcatgagagggcggttcatatccgccatttccagccaggaaatgggcgtaatgattttaaaagctccttctatgataggcaggacaccgctgatcagcacgctggtcagcatgcttacgccaaaagccacggccaggcaaaccagaactccagtaaggttgtagtcccatgcctggagattgatgacacccatgatgcaacacagcaccatgacaagcagccccacaaagaagcccgctcgcagcaactgagcacgattccgcaggttatgggtaagcaacacggtaagcatgccggagagagagctcagaatccagaattggacctgcttttccggagcatattgctccggcagaatgaaaaatccgccaagcatgcagatggaaatagtggcaaacatgcccagaagaggtcccagcagcaccgtgacaaccaacggagccatcatatagggaaggtacaaaagttcattgcctatgtcggaagtaatgtcagccgttacatgccggatgagaccaaaaaacaggagctggaccagaaccgccccccacgtgacgacaaaggttttgtttttcctgcgcagggaaccggcgcataaccagtacataggcatcagcgccagcgtcacggaaaaaagcagaaaagcttccgacacatgatgccatatggattttccccagtggggactgtaactgcccatccattgaagcacgatgaaaaccagcacgcacaacccgacggataccgccaggctggaatccaaacggtcaccggctgaacgggacacggaggcagccccttccggggaggcactttcttttgccgctgcggcggcatgctttttcagaaaatgaaacatgataattatttggggtacacttcggcaacctccggaatagtgcccagccgggccatctcctcttctatgagggggttgacgccctgctgcaccatttccatggaaactctcagggcattgcgaatggctacaggggtagaactgccatgcgcaatgatggtcacgcccctgacgcccagaagagggcttccccctacggagtccgcagaaaggcgcgctttcatggcacggaatgctccggaggcgcaggcagctccaaccatacggaacgggtttgccttaagttcctctttcagccatttgctgaaagccttggcggtagcctcgcatgttttcaacaggacgtttccggtaaaaccgtctgtcagagccacatctatttcatgttcaaaaagatcgtggccttccacatttcctacgaatttaaaagggagcgcaccgcgctcctccaaatgcttcaacagacaaaaagttcccttggtaaaatctgttcccttttcatcttcagagccattgctcataactcccaccttaggcatctgtttgccgtaaacagaacgcgccagaatgctggccataacggcataccctaccaaatgccggggcttggcatccgggttggctccggtatcagtcacattgcagactccgaattcattcggaagctgggtcacaatgcccgcacgttccacaccatccagcaacctcagtttgacggtggcagccgctacagccgcccccgtattgcccgcgctgaccacggcatccgcatctccggacttgaccagatccacggaaatggacatggatgaattttttttctttctcaccgccagcaatccggattcattcatttccacaacttccgcagccggaacgatctccacgcgcgggccggaaagcccccagcggtcacaagagctgcgcaccgtttcttcccttcccacaagataaattttttcaatgagaggaaaatcctgcagggcccgcttcgccccgtccacgttaatatcgggcgcgttgtcgccgcccatcacatccagtgcaatcttcatattatctgttgaagaaatgtgttagcagaaaaaacagtccgcttcaagcaagttcagccgctttgcgaagcaaaagcggctggaaagtctatatgatagcgccgcaatacggcgataattttcaaggcaaatgcggcgcccgcggaacttacgcttccgctttcaccacaatttccttgccggaacgggtcgtgtacgtaccgcaattggggcaggcggtatggccgggggtgctgctgccgcaattctggcacttgcggagcttcggcgcgcgccatgcctgagcggcaaggcgggtacgctgcttcatcttggacgttctgcgcttaggtgctgccataattttagttggtaaaaaggtgattaatgatgatctcccagttcattgagggcgtcccacacgccgctattcctgatcggggcagaactgtttacacccgttcccccctctttgtccactccaaaatacggagttttcgccatacagtcgttttccatgcctccgtcagcacacttcgggtatgccggaaaatccagaactatttcttccctcaaggaatctgaaacatccacaacattctgtgaatcaatctggaaagaagccgcgaaatcacaaacttccaccacgtagtcaaagtagcccaggcaacgcacacagcggaatttaaagggggcggaaatattgcctcttacaaacaattcattttcaaatctctgcacatgcagatcaaaagcaagaggcccaatggaagtaacctcttcatcatcaatgccgaaaatttcagaatccagttcaccgctgtattttttccctgcctccggcaagttctccagttctaccagcaatcttttcatgagtatatcttacaggcatacttaatgcctgacaagcaggcagggcggcaccattcatggaaaatgacacatccgtccctctttcaggcaatgcccgaattcgctccggcctaaccgggaggccattccagcttgcggcctgccaacagatgcatgtgcaaatgggggacagcttccccggcgtcatgcccattgttgatgaccaggcgaaagccaccttcatccagatgaagagtccgggcaatccgcccgactgccagcatcatgtgtcccagaagggcggcatcttcctccccggcctcggaaaggcggggaatgggcttgcgcggaacaagcagcaaatgttccggtgcttgtggactaatgtcccggaagcaaacacacaggtcatcctgatatacgatgtccgcggggatttcccctgaacagattttttcaaataacgtagcggccataaaatcaaaaaggaatctgcaatgactttaacatgttttgcaaaccgtgggcaagttattccctgacggctgaagcgcgtcgcaggcgatccataatagcgcggcccaggccggattccggaacggattccgccacaatgacgtcaatagcttcattttcatccatctgtctcatcagggcaaacaggcgcacggcagcttctgccagccgcccgctgccgggactcatggctaccacttccgcccagtccccttcccgggcaagagcggacgttccttcataggaaagcaagccgtacttcaccccctccaccggggcaaaattttcccccggttccagcagcagcataggtttgcgcggggcgtaatggctggtgagctgccccggcgcatccgccggagattcttccgaaacaggacggcaggaaggcttgcggcgcaccaccttgaccaggttgcgaaattgttcccgggtcaccggcccctcacgcagcaattccagagagggcttgcccttctcgtcaagcacagggcgcacaatcgtgctttccagcccctcggaacaggctccggcatccagaatcatttcaatactgccccccaattccttctgtacggcagaggcggaagtagggctgatatggccgaagcggttggcgctgggcgcagctataggacgccccagcgctttcgccaccccccgcatggcaggatgagcgcttacgcgaacggccaccgtaggaaggccgctggttacaatatccggaatgatatccgcctttggcaacaccaaggtcagcggccccggccagaatctggaggcaagcgtatacaccagatctttcagcccctccggaacggcggtatatttttccacctcactcccatgatgcacatgaataatcagcggatcaaaagaaggccttcccttggcttcaaaaatccttgccaccgcttccgggttcaaggcatccgcccccaggccgtatacagtctccgtgggaatccctaccagcgcgcccgcacccagagcttccgccgcacgggcatacagtttgcggttgtctgacaggggatctacctcgaacaattcggtttgcatggctttatccttgcctgaagaagctcctgcgtcaagcaagacctccttcccctgaaaggagaaaacagacaaatgaataagagcacgtcctgcggcctcatacttcccctctctttttccaactgcctttacttcactccacccttacggacttccccgagtgaaagctggcgcaggaaaaggccattccgctaaaaagttgttttctcacgctaccggattgagtacaatcaagccatgaatagggccgcatcaacatccttgccaaacatcatcctgatcgggctgatgggatgcggcaaaactaccatcggaaaggaactgcaccgggaaacgaaccttggttttacggatacggaccagttaatcgaacgccagacgggaatgcacattccgcagattttcaaaattcatggggaatcacattttcgagacctggaaaccggaatcctgcaacagcttcagatggccgccgcacaaagccgcattatttccacaggaggaggcatcattatcagaccggaaaaccggctgctactgaaaaaactgggcttcgtcgtctggctccatacagacgtaaacatcctgtaccagcgtatttccagatgcaccaaccgccccctgctccaacaacccaatcccaaggccgtgctggaacatctcatgaatgaacggcatgatttttaccgggaaacggcgcacttgaccattgatacggccaatctccacatccatgaaatcgcattcggcattctggaatccgccagagtattccggtcccgacggcaataatgccgacccgtttttccgtgagcgggaaattttctctttctgattcatcctaacgcaagcgcttccggggaagccctttttcccgctccacgcacaagaaacaacaaaaggcgatccccattaaaggaacgccttcaggaaaatgataatgcaccggaaaaggcttaagccttacgggccttacggatcattgaattcaccgtttcagagggctgtgctccgttggcaagccatttgtcaaccttttccagattgatggtatagttgacgccttccttcatggggtcataggagcccacttgctcaatgtaacggccgtcacgacgcgcgcggctgtcgacaacgacgattttgtagtaaggacggtccttggaaccctgacggttgagtctgattgctactgccatatcaattataaataaaaggtgttaatggaaaacttgcgcgccttgccactcacatgcgtgcgcgttcggctttccacagcgggtgcagatgtatgcgatataatggagtcattgtcaataccagagttatttttacaggaaaaaagcctctcctccatttctgcatcaggaaaaattttccaccgccatgcggccaaaagaatacagcatgctgaatccgaaccccgccagcacaagggacaatattccatccagtattccggcataccgtccgtaaaaggaacgaatgggctgccaccggaaaacaagagcccacaaaatccagcccgccgttcccgtcgccacgattaaaaaacagataaaaagagcatcggaaggatcatgatttttttccaacagcggagcggaaagagccacaaagaaaaacgtggccttgggattcatcaggttagtcaccagagcatcacggtaaatacaggaagccggggaaatatccccgcacccggcaaggaaagcattcctccccctcggccatattttctatgccaaatacagcatccagcaggaagcgacgcaaaacagccccacccccaggaaactgtgaaaaacggatgctcctactgtacaagccagtgcagcatgggcaactattccggtaccaatgcccaaagcagccatcactcccgcaccaaagccgtaagccagcgtgctccgggtaacaaaagcctggtcgggccccggagatgcctgggaaagaagcagaatacctgcgaacataagttcttccttcatgaaacaaaaaaacccttatgccctgggatgcgcctgtctgtaaacttccgccattctggcacgcgtcacatgcgtgtaaatctgggtagtggataaggaagcatggcccagcagttcctggacggaacggagatccgcccctgcctccagaatgtgcgtggcgaatgtatgcctgatcttatggggagaaatggtaaaaggaatggaagacagcttcacatatttgttcagcatcatctgcacggagcgagcgcttaaccgggttcctatacgggagacaaacaagggggaattcttcggcagacaggccatggaaacataagtttccagagcagccagagcaggagttcccacaggcaggatgcgctccttgcgccccttccccattaccttcacgccccggaaacggtgatgcacactgccgacatccagccctactaattcactcaggcgcatcccgcaggaataaaaaagttccaatatggcggcatcacggtagggaagccatgcgggagcattggcgggaacggccgtcttgtagggaagctccaacaattccaacatctggttgagtgtcaggaaaacgggaagcgtttttttccttctgggaagggaaacgcccgtcatcggattcgtctccagcccgtgcctccgcatcatgaaacggtaaaaactgcgcaaggcggcaaacctcagccggatggaagacgtggcggcttcatccttcagctcctggaaaagccagtccctcatctggtccggcgtacaattctcccaccctgggaatgaatcagccgcccaggccctgaactggcgcaaggcgcgggcgtacacctccaccgtatgaggagaagcctgcttttccacctccagatactgaagaaagccctgttccggttccagaggaatccccatcatgaagaataaattactccgtacctttatccttgtcatccccggcatccaccggcgactccttcagcagcacttcactaatattggcccggatgaacaaatcaatatcgtccggttcttccatggcatacaaagggctgtctttatggctgtccgccagagcctgctctctctccaccgggctgagcacaccgtcctggtccaaatcgtaaagctccatcatttccttcattttggcctggtacagagccgcggcatctttcatgacaacggcatgttcctctggatcaatgcggccgttcccgttggcatcataattctgcagcaacatgttacgagtcagcagaaacaatccgggagcaaccatgaagcgcttccgtcccaccgtgcgaatttccaccatgggcatttcccccccctctgcggggggggggggcggaggaatttccttcctctcggcgggaaagtaaaacggaattccgtctctcttgtccggcccggcatccggcctgcgcaccccgcgccgcttctctacatgttcccggaaagccctgtactcttccggggaaagccttccgtccccatccttatcaaacttcctcaggaaggcttttctggcctccctccgcgcagagcgggcatcctccaccaaccgggccttgtcctgttcggacaaaattcccgtgcccgtgctgtcatagcggtccaaaaccatttggcggatgagcaaagtcacctgaaggcattccagtccgggcctgggggcagtttccattttcccgcggtcgccggaagccacggattgccctgccgcaaacgggaacagaccgaacgccagcgctgcggaacatgacaagataaacatgtggggcaatctcataaccacttttactaaccccgccggaaaaagacggtttcaaaaataaacatccgcccctgccggcgggcgacacgggcggatgcaggaaacgtacggaaagcggaaaaacttacttctccacttgaacgatcgcgttcttttccaattcaatcaccacgccttccgcaatcttgagagaaacggtgcgctcattcaccttctccacaaaaccgtgcagccctgcgtttgtaatcaccttgtccccgcgctgcagggctgcgatgcgcgcctgctgctccttctgcgccttcctctggggacggatcagcatcacccagaacaggacgatgataatcacaaacatgaacatggggctggcgagaatctgctgaaacatatttgcgggttcctgcccggcggcgcccgccgcatcctgagcctgtgctaacataaagatattcataaaatgtcgtttgctttataccgcgcgataaacgaatccttgaaggaaccgaacgtgccggcggctatggcctcgcgcgcctgggccatcagccggagatagaattccagattctgaaaagaaagcaatcttaaagcgagtatttcaccggctttaaacaaatgccgcacgtaagcgcgggaaaattgcgtgacatgcggatgtccctccgggtcaattgggcgggaatccgtcgcccagcgctgattcttgatatgcatggggccgtccggagtcagcgccacgccgtggcgagccaggcgggtaggcattacgcagtcaaacatatccacgccgcgggcaatcatttccagcaattgggggggggtgcccagccccatggcgtaccggggcttctcctccggcagccagggagcggaatgatcaatggcgcggagcatttcatcctccggctctcccacggaaacgccgccgatggcgtacccgtcaaaatccatggcggccagttcttccgcgcacttctttcttaaatccgcatacacggaaccctgcacaataccgaaatggtgctgacgcccttccccggaacgggggcgatgttcctgcacccacgccttgcagcggcgggcccaacgaagcgtgtaccccagggaggcttccgcgtacttcctgtcgcagggataaggggggcactcgtcaaacagcatggcgatatcactgcccaagtccgcctggatctccatggaccgctccgggctcagcatcatgtacgccccgtccaaatggttctggaaacgcaccccttcttccgtaattttacggagcttggcaagggatcagacctggaacccgccggaatccgtcaaaatagggcggttccaggaggaaaatttgtgtaatccgcccatttgcctaattaaagcggaaccggggcgcagggacaaatgataggtatttcccagaataatctcagctcccagcatctccaaatcctgcggatgcatggttttcacggaaccctgcgttcccaccggcatgaaaatgggggtgggaacccgtccatgcggcaactcaagcgaccccaggcgcgcagccgtggaggaatctttctgatgaagtataaaaggcatcggaatcagactttctgcaatttgataaagcgggcgcggtaaatcggctttcccatggcctcccattgaagctggaaatccgtacggggataaaaaaaatcgtcctcatcccaactggcacggctaaacagaccgctgcgcgccacatggtccagcacccacagaaaatatccttcatgatccgtcttgaacaggaactccccgccatcggacagggaacggtgaagcacgggaagaaaatcctcctgcaccagccggttcttatgatgcctctccttgggccaaggatccggacataaataatgcagccgggaaatgcagccgggctgcatcatccattccagaaagtaacggctttccacacgaaacaccttcacgttatccaacccgcggacggccgcccgggaacaaaccccccgtacgcggcccaaaagccgttctattcccagaaaacggcgctccggataatgggccgccatctgaagcagaaatcctccgtccccacaccccaaatcaacctcaaacggcccatccgcgccaaaaatatcagaaggcgccagcgccttgaaaaaatcgtctggaataaaggtcggatttatcatgggaatcaacgtgcggataagatgcgttacaaaacggactctgtcaaacgagaagaacccctccccgcaaacatggcgggaagaggcccggaaaaacggaaaaaataagccagaacggcccggaaccgtcagctccggcaataaaggcgattataaattttacggtcaaaacggtaatagcgcgcggcgcggtggggaaccccctcctccttctcatccagcggcacaatgtaggggcgggaagcgatttttttgtggaaattacgcacatccatgggcttgctgtgaatctcctcattcagccgccggagctgaagagccgtaaacttggcaggcagcatgtcataaatcagcgcaggctccttcttcacggaagaacgcactctctccagcgccagatcaataatatcccggtgatcaaacgccagttccggcaaatcatctacaggaacccagcgggtcttgtggctttccatcagtttgcgcagcttggtggaaatcctgagcatggccatgtaggccaccgtcaccaggcgtcctatcttctggccggaaacagcctccacccatgccctgtcctccggattcttgatgcgcgatggcgcgccgaaggtatggaactgttccaaatggggggaagacatgccggtcatgtcaaacaaaacgcggcgggcagcggcatccagttcttcctcctcataaatcaaatcgccgggcaatttggaaatggcgccggtatggccgggttcaaattgcgtcttctcaaccagaaggactttcaaaccttcttcatcgaacccgatcaacacacaatccactgagagatgcggataaaatgcctgcctgctcattatgttatctattattgtagtaagttcccagaatcgcatcaacgctacgcaagcgaaccagccaagtcaaccaaaatcaaaatagaaacggcaatgaaaagccggcccgcttggccccgggaaacatcacgccacttccggaagactgcttctcacgggcggaaaaacgcgcccgcgtcttgcatttcatcatctccccgtccatataataaaatcatgcagacaggtatcctcaggggaatgtccgtgctggccgggctgctatggctggcatcctgctcgtcctctcccaaaagccgggattatccgggctacatgacccgcccctataccatccgggggcaccgctaccatcccatgaacgtggaacaggcgctgacgtatgaacaaacgggaattgcctcccattacaatgaatgtgccctttgggggctcgtcagcggaaaaacggcaatcggagaaaacgtgcgcccctggcacctgcacgcagcgcatcccacccttcccctcccgtgcgaagtgctcgttcaatcccttcgaacaggcaaaaccgtaaaagtccgcgtaaacgaccgaggccccttcatcaaaaacagaatcatagatcttagtgaagaagccgcagaacggctggacatgaagcaccatgggctggacaaagtcagaatcaccgtcctttccgtaggagacgggaaatggaaaaaagaagcgcccccttgcgccactccggcctgattccctacttcaacacattccgtgtggtcttaaaatgcatcttggccaccttgggcagcatttcttccccatgcagggccaccagctggcgcgcagctttcaccacttggccggaagctcccagcggcaacttcatgccggcgccctctcccgccgcatccatccagttcacaaaacgttcgcgcgccagaatagatgccgcagccacagcaacatcactctccgcccggacacgctgttccaaccggacacacacctttttggcggcaagcgccctcttcagaacaaacggattggcgaactggtcgctcaatgccatgggacaatccggcaccttggccgccagcccctcaatcaccgtagcatgcccccaggcgagaaaacggttcaaattcccgaactccggataaagctggttataccgttccgggccaatgcttaccagatgaaaccggatgcccggcaccctgcggatcccctccgccaggcaacggattctggatgaagaccctaccagcttgctgtcacaaacgcccagcttgcgcaatgcggcgccgatgcccccgtccacataaacgccggccaccaccagcgggccgaagtaatctccctttccgctctcgtcaatcccgaagtggggaacaaaaccgcatccttcttccatctcttccggctgggccaaaactccggtcacctgcggttccagcgtaaactctataaaatcatccgttccctttccctgcagaagaagcttgttcttcttctcgtaaaccgtcgccagcagggaaggcccggcaaatgaaaaacgcgcatagggaacctctcttctttcaaaccccttttcctcaagaatggactcaagccttccggcctgggcgtcagtcagcatggttgtaaacgtggttcgcatatatctttcccggagccggaacactccggggcaagcaatggaagcatcccaaccattccggtcaagcaaaattcccgcatcacgcggttgaggacgtaaaaatcaagcatgccacggattatgtgattttttaggagacaaatcatgcacgctgaactataaaactcatacattcatatcattctgcactccatatggctaaaacattaacaaaacgagacctcgttaacaaaatcagcgccgaaaccaacttcactcagattgaagtgttcgacatcgtacagcgtgccgtggacattatctccagcacccttgctgaaggcgaccgtgtggtgattcgcaatttcggaaccttccaggtgaaggaagtgaagcccaaagtaggccgcaaccccaaaaatcccgaccaggatgtgccgattccggcccgctccgttgtcaaattcaaggttggcaaggaattgaaggatcaggtcgccaagctaaccgcctccaagtaatccccacagggatcagacagattactccgggcgtctccatcaagcaatggaggcgcctttttgtttgcaatttgcgcggcattcgggaatataagggaacgtgagcatgttccggatacagcaccttcttctgatcaccgtagcagcactttgctcctgtgctacagaacgcacggtagctacaaactttcagccccggcaacgccctgattcggaaaaaacggacgcagagctgatggatgccctggaagcgaaattcgccggcggcttcggccagcagacggacaaggaaggaaacaccaggatggtgtcccaaaaacggagttcctttgaagggctccggtacagcggcaacacgtctcaaatcgaaaaaaaggcttttgaaaccgcatcctttgaaaaaaagaaatttgacggcgcctccactcggtttgaaacgaagaaatgggacggcatcaaatccttcacggatgataaactggaaacaccggacttcatcgcccgcgccaggggagtaaatacccactcctggcaggatgcctccaaacaatacgccacgcaacaatccgactttcatggacgctcctggaaagatgcggacaagcgcctcggccgcactgtcaaccgggacattgaagccaagagacaaagctttggacagccaactatcatgagtgcgcggcaggcccaggcgtatactattcaggaaacgcgggaaatgatgggacgcacggactgatgcgccgatgtttcggacgtgatcccatgccacatttcagattcgacattgttttcagccgccatctataattctgcccgtgagtgccaaagacgttcctccttccatcaccctgcctaccagcgactactataccattgtcaaaatgagcaatcatgccgtcgtgggagtattccgccagcatgtctttgcgcgccgcagcacgcgccgttatgcgccccccatccctgaagaacacgactcctattgcgttaaaagaactccggagcgtgtcatggtccaaatctttcatgacggcaacgaagtttaccgttgcatttttgtgccgcctgccgattattgacggcaggacaaccatgaaagctccttttttcagtccggccttctgcctcattacaagcctgattacagcctgctcttctccctccggccccaatgcgtggacgccggtcacttccggtcctccgcgtgcgcccatcccccagaacgaagttctggtcattgacgaataccccatgggggaatacaccaacgtggggcattttaacgggccggaagggcgcattgtccatgtctctatggaagacaaggaactaatcgactacttcaccaaggaagctgcggccatggggggcaataccgtcgtcatcagggaaccgcgcatccgctaccgttccggcgaaggcaagagcagccgggtggacgtcatctatgttcgggaagaaatgggaacacacggtgcggaagacctgggcatggactcgctccccattgatgaagaatctctgcggatttattagagccgccggaaacgtcccaggtgccatttcctgcccggagttttttcagctctttttattggccgcaccgcaatgcgggcactccgcacgggaattccccttctccatataaaaccggaatccgcatatccggcactggaacttgcgcctccgatccaggaaagatcgtatccatcccacagccaggcaaacagacaccacagcgcaaaaaccgccggcgcccagtaaaaacaggcgcatcaaaaaatcttggagggtcatattcacggctcttcctccttccattcgatggacatggtgccgcttcgcggctcccgggacggaacccagcgcaaagaccgggcgaacctcattgcggactcatccgctccattacttccggaagactccagtaacaaaacttgagaaggaacgccccatacatccaccaccacaaaaaaatcactcctcagccccgtgtgatcttcacttctggaaaaaccggacagggagccggctgtaacaatccgtccatccagccccggggaacaaaaagacaaatagggaatgcatgttccggaaatctccaaggaaggattcatcatggcgcgtatatgaaaatccggatgctgccacatacgccagacctgatccgccacagtgggcacggacacgggggggagaggggccagaggcgtatctgcggaacgcggagaaggcaaagtcacacccatttccccggtcgggccggccgtcaccggatcagcccaaacggggcctctcacaggcagaggagtattgcgcagcacatactgatgcaggcgcggattatctgcaggcagcagcaccacggcacccggctgatctcccctgctgcggatttccggcacctccacatggacaaaaaggccggcggcaaaagcgcaaacgccaaaaaaaagcatccacagaaaaatacgccagcgcaacaggccggtttccctccagtcaaacgtcaatcccaaatgaaggtcgaaaattttatcccggctctttttattcagcttcatgaggtaacaagggaaaaaatcaatccgcgggctcggcggcaatataacacgtcatccccttggcaagcaccatatccaccagctgctgttccagggcccgtgaaacggaatcatccaaacgcagggcaatccccatacggctcccattctccccatgctcccgggaaatccggtccaattctgaggaaacgccgggcagcccgccttcaatcaggcggtttccgatataaaaagcgggctggtcgccagccgtaactgaaataaactcaacatcccccacaatattcatcagaaaatgggaagaaggagcctttacctcatacccgtacgccattcccacacgggaagtcatgatcgtcagcacgcagacaagaacaaccaaatccagcaggacgaccacctgaatgaaaaacgccccggcgggcaatgttgaacgggtcttgatctgcatgcctttcctccttccctgttgcactcacacgccccggccattcatgctctctccggcctcgcgcctctgccgggcatcacacaccaggcaaacggcctccgtgccggcccgttccagggaatgtacaatctggcgggagcgggaggccaggtaggaataaaacaaataagcgggaattgcaatgctcagccccagggcggaactaagcagggcctggtaaacggcatccgacatggcaagagagggagccttcccttccaaaacccccggctgggaataaaatcccaccagcccctggatcgtccccagcacgccgactagcgggctcaccgtagccactaccagcaatccgcggatattcttttcaatctgaaacacttccatctgaacggaatcctctgccacagtccgtagttcttcacgcctcaatccggcatgcgccagcacggaagaaaccacgcgggccgcaggtcccggtaaaatggaagcctcatgccgggcttcatccgtctttccggcatttaccagcttggaaatacctcttaaaaaatctccagtattaatttgaatcctgtgaaaatacaaaatccgctccgcgacaaccgccagcgcataaacggccagaacgctcaaaacccagaacaacggacctatcttgatgatcaattcattcataaccctttttctcgcgttagatcatgcacacttcccatgtaaattcaactcaaacctatgtggcccggaagccgagcttctgcagcagccgcgttcccgcccataataagacggaaccaagccacagcaaggaaccgaaactcaggagccataccgcatcaaacaggcacatgccggaaagcagcaccgtcacagccctttgaacccggggcctgcccgcctcacgccgtgctacggcggaaatcacgcaggtaaacaaaaacaggccgaaagcataccacagcaaggccggaggaggaacggactctccacccgaacgggcaaatgccaggccggcggccagcacccacaccccgcggcacaaccccatcaaaacaatggagccgctccacagtttatggaacacattatacagggaaatcacaatcagcagcaaagcccccacggcaaattccccgcccagcgccatgttcagcaccaggccggacaacccggccgccaaagacaacagcctcagtacggaaacgctcaccgcgccgcacgacacggggcggtccggataacgggcggcatcccacctggcgtccacacggtcattctcccacatgccatacaaataaaagcacagccccatcagcactacgcccccatacagggcgagaggcggcagctccgccccacggacggaagcccacgccgccgccgcgttggtaaacagcgtgggaatattggccggacgggaggaacggagcactcctctcaataaacggcaatcatgcatcgccgcatactgtacagggaaaaacggcgatgaccaagcacatccacagtcagcaaaagtgcaggaaccggcatcccgcccatgccgggcagcatccatacatacccagaaatagattgtctttgcaggacggtcccctatcatgccggaggcattaaaaatactcttctctccccccatgaatatcaggacccacatccaggcgcttctcatctgtaccatgcccctgtccgcacaggggcaaagcatcgtggattcacgggcctcccttccacgggccgtccagcttcacggggatgaaggcagggaaacggtgcggccagacgaatccaagcgcatctctccgaacgaagctccggcatcccgtgttcagccccagcggatcgtcaaccggattgccgccacagtcaacggccgtcccatcacggccaatgaggtcagcgtgcgtctcatgcccatcggagcacagctcgcggcccagtatcccaaacaggggcccgaattctacaagcaactggccctggcgaaaaaaaacatcattgaagacctggtggagcgagaactgctccgcaatgaatttgaaggcatgggcggcgtcattagggactctctcattgaccaggaagtcaaccgcaccatcctgaccacctttaacggagatcgttccgccttcctgaaaaacctgagcctctccggcatgaccatccgcgctttccgggaaatgacgaaaaaacagctccaggttcaaatcatgcgggcttccaaatacgaccaggaaataccgcctactccggaggaaatacagcaggaatacgaatctaccaaagaacaataccgggacctgaccaaagacaaaatcaaattcaagaaaatcttcattcccatgctgggggatgactccgcctccacgccggaagtacagctgaacctagcggaactcatcgccaaggaaatcaaatccaaaaacgccacctttgaggaaatggccaaacgctactccaaggatctatatgcggaaaaaggcggtgactggcccgttacggaacgctccacgctctccccggaatccgccgccatcatctttggcgcacagcccggcgaaatcatcggatcgttggtggactctaccggcttcaccatcgtattggtggagaaaaaggaactggcgccgccgccccccctctccgccatcaaggagcagattgacatcatggcgcgcaacaagcgcagcaatgaacgttataaaaaatgggtggaacgcctccggaaaaaagccatcgtcaaaatatatatctgattcttctcctttccccattgccggaccggcccattcaacaaggccggtccggcgttctctctttcattccccctgttttcctttccgccaaccgttccgtccgctctccttctcctgccgggggcatcttcctctcgcccatatctccggaagacgccttcatacataactggacggcggccgcaagtcatcccgcctgacgcgtggaaccctgctgacgtaatccgggcagaaaccgtatcctgctgaataaaaatcttgcaagatggcagatttccagtcgtaatatcacagatatgttcaccaatattacacgcacgaccctctgcattactgcgttcagcatcgccagcctcatggcggcgcctctgaatgcaaccaaaacggagagcctggattggaactggaaattcgcccgtttcgggaaaatgccggatggcagtacgcaaccggaaccgggaaaagccatgggattcgccactgccaccagtgaagaatccggcaatccggcggacaatgccgtggacggggacaagtccacccgctggtgtgcctccagtggcaaaagcggagaaaaaatcaccgtggacatgggacgccccgtagatgtaaaaaccgttaacatcctgtgggaaaaacaaagcaaccatcttttcaagctggaaggctccggtgacggaaaacgctgggcaactattgaagacaaaacttccgggcaaaacgactccaaggaagacacggtagaaaacaaaaccggcaaaccgcgatacttccgcatcaccgtcacgggcaacaaccagagcaactgggccagcatccgtgaaatcacctttaaaaacgacaaggggaaaattatccgccctcaggccgccgccggaaccagtaaggcggacaatccctccagcccctctttcaacgacaaaaactggcgttccttgaacctgccgcacgactggggcgtggaaggccccttccggatggaaattgaaaacagaaccggaaaactcccctgggtcggaattggctggtaccgcaaaacgctggaaatcccggcggacgccaagggcaaccaattctatctggactttgacggcgttatgtcccgccccaaaatctatgtgaacgggcacctggccggcgaatggaaatacggttacagctccttccgcgtggacatcacgcccttcctgaaattcggacagcaaaataccattgccgtcagagtggacaatccacccagcacctcccgctggtatccgggcggcggcatctaccgccatgtgtggctcacggaatccaaccctgtgcacatcgaacactggggcgttttcgtcaaaactccggaaatcaccaaatccgccgccaaggtggaagtggacaccacggtgaaaaacaccacggacaaagccgtcatccccactgttactgaagaaatcctggacggagataaaatcgtagcctccacaaccaccaaaggggaagaaattcccgccggggaaaagggcaaaataaccagcacgctgacgctcaaaaaccccactctgtggaccctaaacgctccccatctgtataagatgaaaaccacggtcaggatgggagacaaagtcatcgaccaaaaattcaccaacttcggcgtaagaaccgttgaatggaaacccacgggattctaccttaacggggagcgcgtgcagctcaagggcgtttgccagcaccatgacctgggaccgctcggctccgccgcccacacgcgaggctatgaacgccagattgaaatcctgaaggaattcggcgtcaactccatccgcacatcccacaacccgcctgcgccggaagtgctggacctgtgcgataaaatgggcatcctggtcattgacgaacttttcgacgtatggcaatgctccaaagaaggcgtcaacaacgaatcctttaacgaatggcatgaacgggacgtggttaacctctgccaccgggaccgcaaccacccctgtgtcattgcatggagttcgggaaatgaagttccggaacagggaatgaaaaatctgcaccatatctcccaaaccctgacggatcttttccaccgggaagaccctacgcgcaaagtgacttccggctgcaacaacgccaatgccgcacgcaacggctttggggacaccctggatgtttacggctataactacaagccctgggcctacaaggacttcgccaaggaccgcccccaccagccgttctatggtgcggaaaccgcctcctgtgtcagctcccgcggagaatacttcttccccgtggactggaacaaaggcaagggattctacctctaccaggtcagttcctatgacctgtacgcccccggctgggccaaccgtccggatgtggaattcgccgctcaggaggacaatcccaacagcgcgggagaatatgtatggacgggctttgactacattggggaacccaccccgtacaatctggacgccaccaacgccctgaacgtgccggaagggccggaacgcgaaaagctgatggcggaactcaaaaaactgggagaccgcgccccctcccgcagctcctacttcggcatcgtgcacctgtgcggcttcaaaaaggaccgcttctacatctaccaggcccactggaggccggatctcaagatggcgcacatcctgccgcactggaactggccggaacgcaaggggcaggtaacgcccgtgcatgtctacactagcggggatgaagcggaactcttcctgaatgggaaatcccagggcgtccgcaaaaagggcactggggaaaaggaccgctaccgcctcgtgtgggaagacgttaaatacacgcccggcaccctcaaagtagtcgccaaaaaggacggtaaaatctgggctacggacacggtaaccactaccggaaaacctgcggcgctcaccctcaagccggaccgcaatgaaatcaagggagacggctatgacctgtcttatgtcaccgtagccgtccgcgacgcccagggccgtatggtgccccgaagcaaaaaccagctcaccttcaaggtaagcggccccgcggacatcgccggcatctgcaacggtgatcccacggacttcaccaccatggcgaatccggaaaacaagaaaatcatgaaaatcaaggccttcaatggtcttgcccaggtcattctgcgctcccgcaagggagaatctggaaaagtgacgctccaagtcatctccaacggactcaagccggctcagacaactgtgacggtcaaataaaaaaacaggaaaaactccgttccagccgccgggctccatcaggaacccggcggctttttcatcacattattccggggaaaaagagccatctttccaccctctcccggacaggtagggattgaaagaaaaaaactttatgctacccttttgcccatgtctgatctgcccaaagcatacgatccctccctggtggaagaaaaatggcaatcccgctggattgaagaaggttgtttcaaggctgacccggcttctgaaaagcctgcctactctgtcgtcatccctccccccaacgtcacgggagtgctgcatctgggccatgtactgaacaacaccatccaggacatcctggtgcgccgcgcgcgccaaaaaggatatgaagccctctggctgcccggaacagaccatgccggaatcgccacgcaggtaagggtggaaaaagacctcaaacagacaacgggccggagccgccacgatctgggccgagaagccttcctggaaaaagtctgggaatggaaagaaaaacacggaggtatcatcatcaaccagctccataagctgggttgttcctgcgactgggaccgcgaacgcttcacgatggatgaggaatacaccaaagccgttggacaggtcttcattgaactctttaaggaaggactcatctaccggggccgccgcatggtcaactggtgccctgtatccctcacggccctctctgatgaagaagtcatcatgactgagcagaaaagcaagctctacaccgttctttacaaactggaagacgggtccggagccctccatgtagccaccacccgcccggaaaccatcatggcggacgtggctgtggccgtcaacccgaaggatccgcggtacgcccacctcatcgggaaaaacgtcatgcgcccgctcaatcccacccccattcctatcatcggagatgaatatgtagaaatagaattcggcacgggcgctctgaaaatcactccggcccatgacaaggccgactttgaaataggccggaaattcaacctggaaattatcgatatccttacccccgacggtcatatcaactgcccggaagtgcccgaactccacggcatgcaccgctttgacgcacgccgcaaatccgtggaaatgctggaagcctccggcctcatggtcaacattgaagactatgataacaaagtcgggttctccgaacgcgccaatgtcccgattgaaccgcgcctctccatgcagtggttcctcaaatacccctgcgtgaaagaagccgcggacgccgtagcgggaggggacatcacttttcgccccgcacgctgggcgaaaacctacgcccactggctggaaaacattcaggactggtgcatctcccgacagctctggtggggccatcgcatcccggtctggtaccgcaaagacaaggcggaagaactcaggaacgccccggcgctggacgcctccgcactggaacagggcttcctctacgtgggaaccgaaccgccccaggacccggacaactggattcaggacaacgacgtaatggacacatggttctcctcctggctgtggcctttctccaccatggatgaggaaacccgcgccaaattctatcccactacggatcttgtcacgggaccggacatcatcttcttctgggtggcgcgcatgattatggccggataccgtttccagcatgacaaaccgttcagcaacgtctttttcacgtctatcatccgtgacaaaatcgggcgtaaaatgagcaaatccctgggcaactccccggatcctctggacctgatcgccaactacggagcggacggcctacgcttcggactcatgcgcatcgcccccacaggaacggacgtgcgctttgatgaaaaccagatcagcgaaggccgcaactttgccaacaagctgtacaatgccacgcgcttccggctgatgcagggagacgccaggggagaaacggcccctcactactcatccgtacatatctccattatctccaggctcaagcaactgcatgcagatgtagaaaaagcgctggcggactacgaattcaactccctcatccaaaccctgtaccaattcttctggaacgaatactgcgaccgcttcctggaagccgtcaagggtgacctgaaggacggggcgagccctgcggcgcgggcagccacgctcaccacgatggatacggtactcaggcactacctggcccttctgcatccggtcatgcctcatatcacggaagaactctgggcctccctgggctttgcggaaagcaacggcggcctgccgctcatgcgcactcctctcccctctgccgaaaacctcctggcgggacttgatgaaagccgcatcaccctggcgaatacccaggccgcagccctttatgaaacggccaacaaggcccgcaacctgaaagcggaatacgacctttccaacaataaaaacgtcagcttcatcctgaaaactccccacaacgtaccccaagatatcctctcccgcctggccattttggcgaacgccaaatccgtcattcgggacgaggcctactcctcccccaagggaacgcctgcggccctcacgccgcttggggaactcttcctgcccctggaaggccttattgacgtggaagcggaaaaggaacgcctgggcagggaactggacaaaatagccagggaaatcgccaaatccgcagccaagctgggtaatgcgggctttgtggaaagagctccggcagaagtcgtgaatcaggaaaaagcccgtctggcggactgggaggcaaaacaatcccagttaaaagggatgcttgattccctttcctaaccatctatcattccgggaatgaataatattcaaaagtactttgccggccgcgagcaattcattgaattgcttgaagcggtgggcatacgtactcttgaacaattcgcttccgcggagccctccaccgttttgcctgaacttcaccaggcaaaacggatgctgaaactgcagacggaaattccttccgctcccgttttcagggaatgggtgaatcaggctctttcctctcctactgcgccggaaccggagcttcttcccatccatgagggcgacggcctcccccttgccactcccgttgaccctccgattactgattcttcagaaaacagaagggaacgtgggcgttcccatacggacggccctccaaaatatctctccgccaaggccaggctgcaggaagaacacagctaccagcccgcaaaacatgttcacacccacaaggagccgaaaacctaccttcgcaaaaaaggcatcaagcacatgacctccttccggacatggatgggagccgttatcgtcctgctcctgttcatctgcatcctcttctccatttcggtcaccacccttgtgcttctcaatggagaacgaggctggccgttaatcagcctctgcttcggcccctggattctggcgctggttctctatctttccctggcgcttccccggaaatgcagcgtgtgcagggcccatgtcttttcctttaaaaaatacacccgcaataaggcggcccaccacattcccctgttcggctacgtattcgccacggcactgcatatattcctcttccgctggttccgttgcccggcctgcggttcctcccagcaactgggaaaaccccgtaccgaaccgcacaggcattaacgaagcttaattcctgcgccaggcttcacggtatcccgtactcctgcctgctctcttccccttacctggcattcggaaggcggttcctccatctgtccatcccttccattatctgcccctattccccgcacttcaaccccacgctctgacgggacaggaagcccctgcccgcttctggatctcatggaacggctcccggcaacgcatccccccttcccggtaacttattctataaagagccaccatgaggaaccgcctcaaaaccggatcggaaaaatccggcaagaaggccgtttctccgtctcttccggataaatacgtttcctccttcctccggatatcccagcaactcaaacatgcgttcaacgtcatggaaaagcatatccctgaaaacggcagtccaggaaaacaaccggacatttcaacaaccggaattcccccctcattaacctattccggatttgccggcctcgtgcgccaggcaagggctgcgctccggcaaccttctccctatatgggaagcacaccgtaatgaaaacttatcagaaaaacggggacaataaaaaacgccatcctccttttcggaggacggcgtccaaaatcctgaggcgtctcggttagagcacttccggagcaagggaaacaatcttcatgaacttcttttcacggagttcacgagcgaccggcccgaaaatacgggtgccgcgcgggttgttgtccttgtcgatgatgacgacggcattgccgtcaaaacggagcacggaaccgtcatcacggcgaatcggggcggcggtgcgcactaccacggccttcaccacggttcctttcttcacggaagcggtgggaatggattcgcggatatggcaggtaataatatcgccaatgtgagcctgacgggtgcgcttgccgataacgccaatcatcttggcggagcgggcgccggtattgtcggctacctggactagggattccatctggatcatggtatcaaatctcctttacttaatggttgattcctgattaatgggtaagcacttccaccagttcccagcacttcagcttggaaagcgggcgggtttcaacgatacgtaccttatcgcctaccttggccgtggaattttcgtcatgggcatagaacttcttgctcttcttgacgatcttcttgaacttggggtgcggaacgcgggcaacgtattccacaacgatggtcttgtccatcttggtggaagtcaccacgccgacgcgcgtcttgcgaaggccgggcttcttggttgtttcggtttgttcggacattggattctaaaagtgttagaatattctgtaattaccggaaatcctcaattaaacctccccggtttcaccctgaatggtaagggcgcgggcaaggtccttgcggacggtgcgaattctctggttgttttccagctggccggtggcctgctggaggcggagattgaaaagttcttcacgaaggctgcgcaccagagcggaaagctccttggcggacatagcacgaagttctttggcggagttcttatcggacatggtgatgagtagctttagtgttgaacgccttgacgatagacgaagcgggttgatacgcccagcttgttggaagccagtcgaagggcttcacgcgcctgggattcggtcacgccgcctacttcaaacagaatgttgccggggcggacaacggctacccagccttccacggcgcccttacccttacccatacgagtatccgggggacgggacgtaaaggatttctgcgggaaaatgcggataaacaccttacctttacgtttcaggtaacggttgatcgcaatacggcaggcttcaatctggttgttggtgatccaaccgcggtcgagcacctgaaggccgaagtcaccaaaagcaacataggtaccgctggtggcattgccggaacggctgccgcggtgcatcttgcggtgcttcactctcttgggcattaaaggcatatcttattcctccttgtgttaagtgtgatgaacaaatgtggtagcggctttcttaggcgcgcggacgacggggaccgcgagggccggacggacgggaattctgctgggagacgacttcatcgcgcttgttgacccagcatttcacaccgatgatgccgtacagggtacgggcttcggcaaagccgtagtcaatcggagtacggagcgtctgcaacggcaccttgccttcgcggtaccattcggcacgggcaatgtcagccccgccaagacggccggcgcagcggatgcggatgccgtcggccccgcgttccatggcaacctgcacggcgcgcttcatggcgcggcggaaggaaacgcggcgttccagctggacagccacgttctctgcaataagctgggcgtccgtttcaggggaacggatttccacaatgtcaatgttgacctgggtggaagcgccgcacaggccctgaaggtactggcggatcttttcaatttcctcacccttgcggccaatgacaagccccggacgggcagtgtggacggtgatgcggacactgttccaggcgcgttcaatcacgatgctggaaacggcggcggacatcaactgttccttgatgtacttgcgcatcaccaagtcttcatgcagcttggtggcgtaatcctggcccgtggcgtaccacttggagcgccagtccttgttgacggcgaggcggaacccgattggatttactttctgacccatgatattagttcagctatatgtgtgttagattggtatggcctagccttcttgatcggccaggataacggtgatatgggatgtacgcttgcggatcatgttggcggatccgcgggcgcggggcatcgtgcggcgcatcgtgggcccttcatcgaccatgacggacttgaccaccagcgtatcaacggacagttccgcattattctcggcgttggccaacgcggacttgagcgtcttattcagcaggtaggcacctttcttgggggtgtaggacaggatgtcggtcgcctgggagacggacaagccttggatttcttgagcaacatcgcgcatcttcttggcggagatgcgggcgtatttgtaaacagctttcacttccatgggtttttcctcgtagtgcaggttattatgaagatgatttagtcgttggtttttactgaggcagaatctccgacgcgcaccggatcggctggcgtctcaagtttctgaacaagcgcgccacatacttccttgcggacgtccgtgactacggcttctccgatggtttgagctccccgggttaaccgaaccggcatcccgacttgcattcctgccgttctgccggtattcagcaccaccactccggattcggaatcaatgctgagcaccttggcttccgccagggttcccgcgccatctcgcacgggctgttgcctgtatcccagaacggattccagcaggcgcagagaactctccacagccgtcctggcgttcgcatcttcggatatggcttgtttcatgtaggcaaggatggctccggagagcttgacggatgcctgctccagccgctggacgcggtcattaaaagcttcgatatccgccatcgcctgaatcaggcgttcctcgctgttacctagcgcagcgccccccaaagcttccagcctggaacggatgtccaccagctgtgcggccgccttgtcggcgtcgctgcgggcctggacataggatgccttgagggccgcattctgcttttcgaggcgctcgattctgcgcgtcagtgccgccgtatcctcttccgctccctgcaacgccccgcccagccctaccagggtggtaagagagtatgcaaggatggaagaagaattcgacatgttgattgttaacttactgattacttcttaccgataccgccgtgctgtttgaagacacgagtcggggcaaattcaccaagcttgtggcctaccatgttttccgtgacgtacacggtggcaaagttcttgccggcgtgcaccaggaaagtcaggccgacgaagtcaggcgtaatcatggatgcgcggctccaggtcttgatcggcttgcggtcgccggattcaagctgagcgtcgatcttggcgagaagcttttggctgacaaaagggccttttttgagagaacgtcccatgttatataatcctagttaaagttataatatattgattacttggcattgcggcgctgtacgatgacggagtcgctgggcttgcggagacggcgggtcttctggcccttgacgtggccccacggagatttgaggtgctggcgaccgccaccggacttggacttgccttcaccgccaccgttcgggtggtcgacggggttcatcgtcataccgcgcacggtaggacgaacgcccatccagcgggtacggccggccttgccggacatttcgttcatgtgctgggtattgcctacctggccgatcgtgcagtagcaatcttcattgaaacggcggatttcaccggaaggcatcttgatcagcgcgtaacccgcttcacggttggaaacgatggcctgctggccggcagcgcgggctaccttgccgccggaacccggacgaatttcaatgttgtgaacggaagtacccagaggaacgtttttcaagggcatggcattgcctaccttgggagcaaccttctggccgctttccaccttcatgcccacctgcagccccgtgggggccagaatgtaggatttttcaccatccttgtactcaatcagagcaatgcggcaggtacggttgggatcgtattcgatagtaaggacagtagcgggcacgtcaaacttgttgcgtttgaagtccaccaggcgatatttgcgcttatggccaccgccaatgtggcgggtggtgatgcggccattgttattgcggccgccggatttcttgaggggtctgcagagactcttttccggggtagaggtggtaatttcgtcaaaggacggccacaccttgtaacggttagagggagtaactggcttgaatgacttgagggacatgatagctttccttcctaataggggctttaaacgaggtcaagggtttcaccgttggcaagcttgacgtaagcttttttccaatgagcggtgcgacctgcatcagagcggcgctggcgcttgagcttgccgtcatagttggcggtacgcacggatgcgaccttcttgccgaaagcaacttcgacagcctttttgatttcgattttgttggcgtcacgatcaacttcgaagaccagctcgccggtagtttcctggagcatggtggccttttcgctgatgcgcaccttcttgatgacttggtaaatgtctttcatggcttcttaaacagtacggctggcgagggtttctaaagcgttgtcaacgaggatcactgcatcagcattcatgagctgttcaatgttcacttccgcagcggtcatcaggagaacttcctgaacgttgcgggcggcacggtaggtggtttcgtcaaaggaagctgccacaatgagcaccttcttggcatccgtcaggtctttgacggctttgatgaaagatttggtcttgccgtcagccacggaaaattcggaaacggtgctgaccttggaagcggcaatcaggtcacccagtacgcggcgcagagccaggcgtcgggtgctcttgttcaccttcttgctgtagtcgcaggggcggggactgaagaccacgccgccgcccacaaagatgggagcgcgcttatcgccgtgacgggcattaccggtgcccttctggcggaagatctttttgttattgccgctgacttctgcgcgggtcttggaattggcggaaccggtgcggcggttcgcctggtaagccacgatcaggtcatgcacagcctgggagcccttgtcactgcctacaacctggatgttggcggcggcggcggcttctaatgtaaaggtatttgcggacatagataggttttcctataatcaatgtgaggttaactaaagccttacttcttcttggcggggcgaatcacgaggtaggaaccgcgcgcgccgggcacagcgccggagataaggatgacattatcttccggacgaacggcgacaaccttcaggttctgcaccgtgcgcttggcattgcccatctgtccgggcatcttctggttcttccagacgcggccgggggtggaacaaccgcctacgccgccggtacggcggtgcatcatggaaccgtgggcggcgggagagccgtggaagttgtggcggcgcatcgccccctggaaccctttgcctttggaagtgccgatcacatccacccactgtccggcggaaaagagatccacaccgggatcttctgcgccttcagcaggcaattcggatgcttctacgcggaattccttgaggagtttggtaggctggatgcccagtttcttgaagtggccggcctgaggcttggccacgcggctttccttctgcgcatcaaaagcaacctggatagcattgtagccatccttgtcttccgttttaatctgagcgaaggtgttgcccttgacgtcaatgacggtcacgggaaccatagcgccggattcctggtcaaacagacgggtcataccgaccttttttccgataagtcctagagccattgtagtgtgtctttctgttttttaattacttatccgggtgccaaactagatgcggatcgtgatgtccaccccggccggaagattaagcttcttgagctcatcaatcgtgcgcgcagtcgggtcgacgatgtcgagcagacgcttgtgggtgcggatttcaaactgttcagccgattttttgttgacgtgaacggaacggttcacagaaaacttttcaatacgggtcggcaacggaatcgggccgtgaactttggctccggtgcgcttggcggtttcaacgatctcctgggaggagcggtcgatggcgcggtagtcgaatgcgcggagtcgaatgcggatttttggactttgcatggacgtgcggtctattggttatacttcaaaggtttgtttatttagccttctcgctgacaatctggtcaacgaggttctggggcacctgttcaaagtgggagggttccatggaataggaagcacggccactggaaagggttcggatggcggtggaataaccgaacatttcggacaaggggactatagctttcaaaatgcaggcgttggccttgttttccatgttgctgatctggccgcggcggcggttcaggtcgcccatgatgtcgccctggtaatcggtcggcgtggaagcttcaacggacatgatgggttccagcatgatcggcttggcttttttgaaagcatccttcatggcaaagatggcagccattttgaaagcattttcattggagtccacttcgtggtaggaaccgtccaccacttcaacgtgcacgtccaccaccggataaccggcgacgacgcccgtggtcatggcttcattaaggccggcataaacggcgttcatgtattccttgggaatggcgccgcctacgatcttgttttcaatggtaagccccttgccgcgttcgttcggcttcacatcgatgaccacatggccgtactggccgcggccaccggactgcttgaccagtttgccgtcgccatgggcaggggcagtaatggtttcgcggtaggcaatctggggcttgccgatatcggcttccaccttgaattcacgcatcaggcggtcaataatgatttccaggtgaagttcacccatgccggaaatcagggtctggccggtttcttcatcagtcttcacccggaaagtcgggtcttcttcagacagacggcccagggcattggacattttttcctggtcagccttggtcttgggctctaccgccatggaaataacggtttccgggaaggtggggggttccaggcagatatcattgtccgggctggtgatggtgtcgcccgtggtcacgttgcgcagccccacgatggcggcaatgtcaccggagtacacggcatcaatatccgtatgctggtcagcctgaatctgaatgatgcggcccacgcgttccgtcttgcgggtgcggggattgtacacggtgtcacctttcttgagaacaccggagtacacgcggatgaacaccagcttgccgacgaatttgtcagcccagagcttgaacgccagcaccatgggcttggcatcgtccgtagcggtgatttcgaaggtcttttccggatccagcgtgctttccgcgtgggcgggaacggtttctaccggagaggggaggtaatccaccacggcgtcaagcaggaactggacgcctttgttcttgaaagcggagccaccagcaacaggcacaaatttgttggcgatagtggcgcggcggatagcttccttgagctctttgggcgtgaagggttcttccatgagcaccttttcagcaagctcatcgtccacgtcagccactcggctcacgagttcatggtaggccagttcggcttcttccttgagttcggcgggaatatcctcaatcgtgtaggtggaacccaggcggtcgttgtcggcgtaaatgacggccttctggttcaccacgtcaatctggccgcggagctggtcttcagcgccgatggggatcagaatggcagcggcattcgcgcccagcttgttgtgaatatcgtccagcacgttgttgaagttagcgccggtacggtccatcttgttgacgaagcacatgcggggcacgctgtacttggtggcctggcgccacacggtttccgtctggggctgcacgcctgccacgccgcagaacaccacgatggcgccgtcaagcacgcggagggaacgttccacttcagcagtgaagtcaacgtgcccgggagtatcaataatgttcagctggaaattttcgccttcgaacactttgctgataccttcattcttcacctgcttccagttggtggtaacagcagcggaggtaatggtgataccgcgttcgcgttcctgctccatccagtcggtcgtggtggaaccgtcgtgggtttcaccaatcttgtgaatcatgccggtgtagaaaaggatacgctcggacaacgtggttttgccggcgtcaatgtgagcggaaataccgatattgcggtaacgctcaaggggagccttgcgattgggattatttacgtgatcggacatagtgtctggaaagtatctgtagtgatcgaaagtgaatgattcggctgacagtcgcagaaggaattaccagcggaaatgggcaaaggcgcggttggcctgagccattttatgaacgtcgtcgcgcttgcgaacggaagaaccctgattgttggcggcttccttgatttcgttggcgagagccttgtgcatcggcacacccttgcggttgcgggcgtagttcacaatccagcgcatagccagggattcggaacgggccggatccacttcaagcggcacctggtaagtagcgccaccgacgcggcggctcttcacttccacacggggtttggcattttcaatggcgcgggtgattacttccagaggatcaatgctgtccgtgccttcgttagccatgtcaatagcggcataaacaatacgttccgcaagggagcgcttgccatccagcataaccttgctgatcagtttgccaacaagagcgctgtcgtaacgggggtcacgacgttcgatttttctataaacgcgtttacggcgagccataatatatagtaggtaagatgtttggtttacttggcagcagccttcggacgcttggcgccatacttggagcggccctggcggcgcttgtcaacaccgaggcagtcaagagcgccgcggacgatatggtagcgaacacccggcaagtctttcacacgaccgccgcgaacaagcacgatggagtgttcctgaaggttatgaccttcgccgccaatgtaggcgatcacttcttcaccattggtaagacggactttagccactttacgaagagccgagttcggctttttgggcgtacgggtcatcacctggagacaaacaccgcggcgttgcgggcagctatgaagagcgcgtgatttggacttctcttccggagtaatacgtcccttgcggacgagctgattaatggtcggcatgttttcctgctttggttgtggttcgtcggtctgatccgatattcaaggcgaacattcctttttataagcaggaagcgcgccttttttccggaggcaaacccgatagaaaacgtatttcttgtgcctttcggcacgtttggggacggccaatataacgtgattttatatcatgacaagtcttttattcatcttttcctaaatattttatccgttccattttccccgctcctttcaaaactccatttcaggctcccggagtcctttttcctccccgtccagcagttctccacttatggaggatgaaacaaaaaatcttcttcacaggcaaaaaaaacatttcttcatgtccgacatgttaccgcagaaaaaaatgcatgaagcgccggagaggcacaaaaaacaagctttccatcagaattcacgaaaaattttttcataaaaacggcagccggtctattatttattgttaacctgcctgctttcccattttgccccgtccggaaagcatgacataaaaaaatccgtttccggaacgcatccggaaacggatttcatcaatgaactcagcagcccgctatttcccgggggtcaccagggaatgtccggacatttcggcaggctgtttcagccccatcaggctcagcagcgtgggagcgacatccgccagaatgccatcggagagagttacctgatccttgtcgtccgccacgtaaatgagatccacaaggttggtcgtgtgggctgtattcggagaaccatcctcattgcgcatgtgttcggcattgccatgatccgccgtaataagcagcttgccgccaagttccaacaccttcttcacacatttttccaaggcgctgtccactgcttcgcaggcggcgatgccggcttccacaaatccggtatggccaaccatgtccccattggcgaaattcatgattaccacatcatacttgtccacagcgtccacaaatttatccgccacttccgccgcgctcatctggggcttcaggtcataagtagccacttcccggggggaaggaacaaggatgcggtcttctccggggaactgggtctccacacctccgttaaagaagaaagtaacgtgggcgtacttttccgtttccgctatgcggagctgggttttcccggcttccgacacaatctgcccgaaaatattgttcagctgttcctgttcaaaaacaatgggagagggatacttggcatcgtattccgtcaacgtcacatagtgcactttgggcgttacttcacggtcaaatccgtcaaattcggggtaaaggaaagcgtcgctcatctgccgggcgcgatccgcacggaaattaaagaagaacaccacatcgttgtccctcacgcgctgttcgttgccataggcaaaaatgccgggcttcaggaactcatccgtctcccccttcgcataacactgctccacatattcggcaggggagcaggagcactgttcgccgcgccccagaacgatggcatcccatgccagcttgttgcggtcccagcgcttatcccggtccatcgcatagaaacggccgacaaccgtggcaattttggcgccgtacggcctgacggcttcctccagctggcgaataaagccggccccgctggttggcgagcagtcacggccgtccgtaatggcatggatgcaaatatcgcggacacccgcttcataagcatatttgacgatgccgatcaaatggttgatatggctgtgcacgccgccgtcactcaccaggccaagcaggtgcagacgggaagaagcggcctgggaaaaagcggtcttcagcacggcgttttcccccatggatccatctttgatggcattgtccacccggcagaggtcctgaaagacaacgcggcccgcacccagattcaagtgccctacttcggaattacccatctggccgtccggaaggcccacgtcctccccggaagcgcccagcaggctgtggggatagttggcaaggaggtaatcagtaaagggggtatcagccagaacagtggcgtcaccgtactctttcgcgacatcaggccccaacggattgcggccccagccgtcgcgaataacaagaacgacaggctttttagaagacataggctttatttacaggcatcccctccttttgaaaagcccgaaatcaggcattccctctccgattccggaattgcctgaggtttgccgcccttccccacacggacgactacatatcttcccctcatcaccggacgctcggaatgaaatacagcaaatttccattccagagaactggttcccaccgttcccaggcttaattctatgctcagccaatctcccagccccgcagagctggagtaatccgcctccacatgcacgcggggccagccgcagtctggggaaagaacctccaccccccgggaacgcaggtactcgtgctccacttcttccaccaaacaaagcagccgggagaaatgggccaccccggaagcatccgtatcatgaaaagctacctggcgcgttctgacaaagggaatgcagggaaaatcttcaggcatgccgtcatcctgcctcctcccccggaaccatgtccagccgcaaatgcgcgacaatatgtcacatcagcttgatttgtgacatgcctctctttatatataagagcaagccgcacggcaacggacccgccgccatgaaaaaagacaccattgacaagctgatcggccgcattgaccacatcaaggaggaggatctccagcgcttttttgtcaagctggcggaacagcagggttttttccagcaggtatttgaagccattcaggaaggcctgatcctgctggataacaagggaaaaattctgttcgtcaacaaggctgcccttaaactctttgacaaggaacgcgggcaaataaccccggatgacttctgtattttcctgggcagggactgctcatgggacacgatccagcagagccagaccgccgtctcccgggacacggaaatcttttacccggaacacagattcctgaacattttcatttcccccatcggcagcaaaaaccagggccacctggtcctgatacgggatgaaacgccccggcataaaaaaaacgcggaaaaccttgaggcagaacgcctgaatgccttgacgctgctggccgcaggagtggctcatgaaataggcaaccccctcaattccataggcctccatctccagctccttgccaggaaggcaaagcagctgcctccaaagtaccggacggacatggaggaattgctgaaaacagcggagagcgaaaccacgcggctggacgttatcctgaagcaattcctccaggccatccgccccaccaggcccatccgggaaccctacaacattgaaaccatcctcatggaagtgctgaaactgctggaaccggaaatccagcagcgcggcatccaaatcaacacggacctccagcccagtcttcccatcctcagcctggaccccgtccaaatcaaacaggtcttttacaacctgatcaagaatgcctaccagtccatccctccggagggaggcaccattctgctcaaaagcggttatacggatgacagcgtattcgtcactgtggcggataccggctgcggcatttcaccggaggtcatgggcagcatttatgaacctttcctgaccaccaagtccaccggctccggactggggctccttatcgttcgccgcatcgtgaaggagcacggcggatccatcacgctggccagccagccgggtcagggaaccaccatcacggtcttcctgccgcgcgtggaacgcaccatcaggctcctgccatcctccattccctcatgaagatgcctgttctgctgattgtagatgatgaaaaacccacgcgcgacgctttgcgcatgggttttcaggatgattatgaagtgtacaccgccgccaatctctcccaggcttccgccctcctgcaggaagaatctccggacctggttctgacggatctgagactgggcggggaaagcggcatggacgtgctgaaagccgctgcctccctgccccaccctccgcaaagcatcatgatgactgcctacggctccgtggatgccgccgtagcagctatgaaagagggagcgtacgacttcgtcaccaaacccctgaatctggacgccgtggagctggtgctcaaacgggcgctccatacccggaacctggaaacggccaaccaggaactcaccacccgcatccaggcggactccggactgcaaaaactcctgggcaggtccgccgccatggaacacgtattctccattattcgtcaggtggcccccagcaaaacgactgtgctgattgagggggaaagcggcaccgggaaagaactcgtagcccaggccatccattccctttccggaaggccggaaaataaattcgtggccgtcaactgtgcggccctttccccccaattattggaaagcgagttgttcggccatgaaaaaggctccttcaccggagccggacaacgccgcatcggccgctttgagcaagcggacggcggcaccatctttctggatgaaatcggggaaatagacgccggaacacaagtccggctgctgcgggtgctgtctgaacggaccattgaacgcgtaggattcaatgcatccattcccgtcaatgtgcgcgttatcgcggccaccaacaaatcattgaaaaagcttgtgcaggaaggaaaattccgggaagacctctacttccgcctcaatgtggtgcatatccagatgccccccctccgggatcgccgtgaagacatccccctgctcgccaccgcctttctgaaggaattcgccagggaaaacaacaaggaattcaagcccctttcccgggacgcccttgaagccgtccggaattaccagtggcagggaaacgttcgtgaactccgcacggccatggaacatggcgtcgtcatgagcaattccgccagcatagacctccatcatcttcccccgcaactgcaggatacttctccggaagccgctccacaggaacggccggaggacaatgcacccaacacgcagaatgggcttgtcccggccggggttttgaatttatccttgctggaacggaatgccatccaacaagcgctggcccagtcaaacggcaataaaacggcagcagcccacctgctgggcatcagccggcgcactcttcaacgcaaactacaagatatcctccattcatgaatgagccatcctcggcatcccgcaccccttttatcattatccttatcctgctgctggcaatcacgggggtgcagtactttttcaactttaacgggctgggcactgatgccgccatgaactacgcccaaatcgcccgcaacgtagccagggggcaggggatgaccaccaactggctgagacccatccagatggtctccggaagcacacgcgccggcctcaacccttttctttcagacgcccagatacacgaacaggaagccatccgggccggacaaggcgaaaccctcgtcgatccggaaaaattcaatccctatgccctccgggacacacgcaacgctccgctgaacatcctgacggaagcagctgtcttcaggatggccggcgtccacaaatttgacctgtggagcatgacgggctcatccatgatttacctgcctgaccggattgtggcgggcatttcctgcatgtttttcatcctgtccgtcctgagctgctattacatccttctccggatgtttgacgtcaccatcgcctgcttcacctgcctgacgatgatactcagcaatcttttcctgcaatacgctaccagcggcctcccgcagatgatgatgctctttttctttgcctggggcatccactttttgtacacggccctgcaaaacaaggaggaaaaccgtgcattcctgtggcctcttatcggcagctccatctgtttttcatgcgtctgccttaccggatggatcgggctgtggcccatggccggttttctgatttttgcaggcatccggttcaaaccgcacggcctgtactgcattccgggccttatcactctccttcttttcctggcctaccccatttacattaaccgctccctcagcggaggcttcttcggaacggcttattacaccatcttcacggggctgaccggcaatgaagaaatagcgatgaacgccctagtttccgggagcattcccatcgctgcccaaaaagtagtcacttccgtcatcaacaacattctgacacagggtgaccttctctacgaaaacctcggcaatctccccctggccatggtatttctgctggccctcctgcataaattcaaacgtccggaagtcaaccagtccaaatggggcatttttgccatgtgggtccctgccgtcatcggcatggccatttatacctccaataaaaccggcatttccttagggcaaattcaaatcctcttcgctccctttttcacggcctatggcacggcatttgttctcaacctgatagccaggcattccaacaaagagctaatctccatccttcggggaggcgtcctgctgctctcccttctcatcacttcccttccgcttctgctcaaccttccgcacattgtgcgggtgggcatcctgacggccggccgcggcattccggcatggccgccctactatcccctgggacttaaccgggatcttcgcacccagacagcggaaaaggatttcattctcacgcaccagccgtccgccgtcgggtggtatgcagaccggaaagccatcggtattcccaaaatggtggaacaattcatggtgctggaacgcattttgaaattccacggcggcaaggtgggcagcattctggtgactccttcttccacgtcaaaaatgaacctccgcaccatttcctcctcctatggagaattcactcccctcgttctggaaggcacggttctgttccagaccaaggataaaaaccccgtgtacatctttgaccacagccgggcgcttgcccccctggcgcagcgctttggaacgcctgactcccgccaattcattcagggagcggaaatgattctttacaaagaccttcaggaaaccgcccctcaaccttaattcccatatggccaaacaacggaaaaacgctcccggatttgaagaatccgtagcacgcctggaagaaatcatacgcctgacggaagcccccgtcaccgagctggaagacatgatagccctggtggaagaaggcaataagctcatccgtcactgccgcagcatcctgcatgatgcggaactgcgcattcaaactctcagcagcccggaaaccgttcaggataaaacggatactgatgaaccagacaacaatgaattctccctcacctgaacttccggaactgctggcaagcatccgcagccacgcagatctgatgaaaatccctgagtcggaactgcccaggcttgcggaagaaatccggaatactctcattcactccctttccctcaccggaggccacctgggccccaacctgggcgtggtagaactgagcattgcccttcaccgcgtctttgaaacgccgcgggataaaatcatctttgatgtctcccaccaggcctatgtccataaaatgctgactgggcgcgctcccctgatccacaccatccgccagcacggggggctttccggatttgccaaaatgtccgaatcccctcatgactcctacggagcggggcatgcgggcacggcgctttccgccgccctgggcatgtgcgcggccagggacctgaaaggagaagactaccatgtggtggccgtagccggggatgcggcattcacctgcggcaccactctggaggcgctgaacaatatcagccagaccaccaaacggtacatcaccattctgaatgacaacgaatgggccatcgacaaaaacgtaggagcgctggcaaaatacttcaactccctgcaaacatcggaaacgttttcctggttaagggataaaacggcctccttcattgaaaagctgggcggcacgcaggccagggactttgctttcaagctggaaggcaccaccaaaaaccttatcttcccgtccctgctgttcaacaaattcgggctgcgctattttggccccctggacggacacgacattcccaccctgatacgcacccttgcctacatcaaggatctcaacgaacccgttattctgcatgtggtcactcagaagggcaagggctaccagcccgctctggacaaccccaccaaattccacggcctgggctcctattgtgtgagggacggggaaacacaggccgcccccacccccacattctcccatatcttcggctccacgctggtggaaatggcgcgcgaggatgaatccatcacagccatcacggccgccatggccagcggcaccaagctggacttattcaaggaagccttccccaaacgctatttcgacgtagggatcgcggaagagcacggcgccctcttcgcctgcgggctggcggcggagggcatgaaaccctacatcgccatttactccactttcatgcagcgctgtattgacatgattcaacatgacgccgcgctgcaaaaactgcccgtgcgtttctgcatggaccgcgccgggctttccccggacgacggccccacacaccacgggctgtttgacattgccatgattcgcagtatcccgaacattgtcttcatgcagcccaaggatgaagccgaattcgtccacatgctccgaaccatgaaccattaccagaacggccccaccgttatccgctatcccagaggatgcggcgccggaacccccgtccccgccaaggcggaaatcctccccatcggcaaggcggaagtacttcagacgggacaggatgtaaccctcgtttccctgggcaccatgatcggcatcgcccgggaaaccgcctcgctgctggaagcccgcggctacactgtcaccctgatcaatgcccgtttcatcaaacctctggatgatgaatgcatccgccgtcacgcagcacgcagccgggtggtctgcaccttcgaagaccactccatcagcggcggcttcaactcagccgttctcgaatccctggaaaccggaaatgtcaagacgcccgtggaagccatcgcatggccggaccaattcattgagcatggttcggaatccatcctcagaaaaaaatatggactcacggcggaagccgcgctacaaaaaatcattccccacctgaactcctgatctgtaactcctgatctgtttatgaaaacacgcaccttcctgctggcagcccttgcgcttgcccttcttcccgtctccgcgcggcaatccctgccggcctccccttcccctgcctggattcaggaattcaacaacctgccggaaacaaccagaaaaagctatatagcccaattccgcaaagcggaacagctctttgcccagaaaagaatcatggaatgtcttttttccctcatggagctggaaaaactttatgccggaaatccgggcttatacaacctccgcggcgcatgctacattgaaatccgcaatatcgaaaaggccctggaaaattttgaaaaagcccagaaactggatccctccaacctcaccatccagttcaacctggcggaagcgcattacgtcaatcacgactattccagggctctgaaagcgttcacggaactccttctccccttcaaggacaatcccggcatgacgcccctgctgcaattcaagcgttatatctgcgcccgcaaactggataaccagcctcttgccgcggaattggaaaagctgtacggcccgatggatgatacgccatactactactgcacccaggccatcctcaaactgatggaaggggacaaggaagccgcccagggacagctcctttccgccatccgcatctacggaggcaccagcgccatccaggccttcacggacgccatgacggaggctggcatccttccctccccctatgggcaaaccgtcccaaccgaacagccggtaaaaaccggactggaaaaacgccgttaatgaatgcggaagcgacggtcctgaagctttatcccctgggagaaaacggcctgattgccgtctggtgcacggaagaaggccttatcaggacggcggcaaaaagcgccagaaaacccggcagcccctttgccgggcgtctggacattttctatcagtgccgcatgcagtggacgcaggcaaagaagggggatttgcacaccctgacctccgcagacctgctttcaccgcgcctggccctccggaaaagctacctccggctcagtgcggcaggctatttcgcgcgcctgtttctccaaatgctggaaccggacacgcccatcccggaattttacgacttgctgcagagggcctacacctacctggaaaacaatgatcccacgctacgcgccgtcctgcacttcgaacaggaactcgcccggctgcatggaatagcccacccaggcatcccggcgcacgtcattctgaaatcccacttcggcaagcttcccccgcagcgggaaaaactgctcggaagcctggaacaaaaagaaagctgagcaacatgcctatcctgctttcatcctcagcaggggatgttccccgccccgctcaacacgtccttcctccgggacgggatgcgcattgttccgtgcgcgagattgacttgtccgcagccttcgggcagaatatccggcacggttttactgcatgaagatccttgacagatacattgcccgccagctgctgggtgtcacggccctgggggtaatggccctgagcgccctgctccttctgggaaacctgttcaaggaactgcgtcccctcctggtggaaaacaaggctcccatcagcatcgttctggaattcatcttccaggtcatccccttttcgctgatgttctccattccgtgggggttcctgacggccgttcttctggtgtacggccgtctggcctcggacaacgaactcacctccatgcgcatgtccggcatgagcctgtggcgtctgagcgcccccgccatcgccatcggcatcgccctttccggcctttgctactggattaacatagacatcgcaccgcgcgccaagcaatccatttccgagttgctcatcaaagccgcatccatcaacccgaaggggcttctcaatgaaggccaggccattaccaaattcgacaacctggaaatctacatcgacaaacgcgtggacgacgtcatccacggcatgcatatctaccagaaagcggacgacaaatccccgtctgtggccatgcactcggaacgcgtgaccatggatttctcccccgagaaaaaaatcctcaccctgcatctcatcaatcccctcatcaccacgcaggaagaaggttccatctcccaaagcgtgaccatggacgagatgcctctgagcatcaacctggacaaatcccgctcccgacgcatcaaggccaaccgcttcaccaaccgggaaatccgggaagctctggacacgcccggctatctggataaaaagcagaccacggaattcgccacggaactgcccaggcgagcctccttctccctggcctgcatcgtctttgccctcatcggcgtgccactggccatcaacacccgcagaaaagacacctccacaggatttgccctgggcatcctgatcgcctcactctactttctggccctgatctttgcagacttgtcccggaaaaacgacacgatgctcccctatattctgctgtggcttcccaacatcatcacggttgccgtggcgttgcaccttcacaaacgggccaggcacaagggataagcccccggcggaagcccttcccgctggcgtggaattagctttcacagcatgggagcttcgggtaacatgatgtgcatgcagcacgtccccaccatcgccatcgtaggcaggcccaatgtcgggaaatccgccattttcaacagaatggcaggcaggcgcatcgccatcgtgcatgatgaacccggcgtcacccgcgaccgcctttccgccccctgcaagattacggaccgcgcctgtaaaatcatggatacgggcggcatcggcgcgcgcctgagcgacggctttgcagaacaggtagaggcagaggcggacattgccataaaaacggcggacctcatcctcttcgtgctggactgccgggatcaccttacacctatcgaccagagcatcgcggactacctccgtaaatcggacattcccgtcatcctccttcttaacaaagccgaccacgaaaaacaggatcttaatctgggcgaatttgccggactgggttttgacgaccatatctttctttccgccgcccacggcagaggcttttccgaattagcctcccggctggacggttttctcaagcagaaaggggctccgcttaaagaagagctggaggaagaaccggaaaacggagaggaaacggcccttcccatcaaggtagccgtagtgggacgccccaacgcaggcaaatcctccctggtcaacaccatcctccgggacaggcgcaccatcgtctccaatgtggcgggcactacccgcgatgccattgacatcccctacctgcacgacagccagccctacgtgctgatcgacaccgccggcatgcgcccccgctcccgtcgggacacctccgtagaagttttctctgccatgcgcagtgaaaaagccatccgccgggcggatatctgcctgctggtcattgacattgcggcgggcatcacgcagcaggaccgccgcattgccggcatcattgcggaggaaggaaaaccctgtatcatcatcgtcaacaaattcgacctcttccatccgaatgcctcccgcaaggaccgcatggcggaagtggaggaacaggtgcgcagggaactcttcttcatcagctacgcgcctttcatcgccacctccgccaaaaaagcggaaggcgtggaaatcatcttcaaagtcatcacgcgcatccgccgggaatcccataacctgcccactaccggccagctcaaccgtctgatccagcttgcccagcagatgaatccccccggcgccgccagaggctctgccagaaggttgaaaatatattacgccaccacagcggtgcaccccaagtacaatactattcccgtcccgcgctacgttcttttcgtcaatgacaaaagcctgctcacggacagctattcccagtacctgcgcaacaaaataagggaagcctaccccgctcccggcattccggtcatcttctccgcacgttcacgcgtgcgcaacgactgatcatccctccttctccgcatgctctccgtcaggaacctcagcgcctccttccacaccagggccggcattgtccgggcggtaaggaacgtgtcctttgatgtagccccgggggaaacgcttggcatcgtgggtgaatccggatcaggaaaatccgtcacctgctactccatgatggggctcattccgatgcctccgggccgcattgaaagcggttccgccatgctggacggcacggatctgctccgttgcccggaaaaggaactccgggccatccgcggcaaacgcatctccatgatcttccaggaccccatgacctccctcaacccgtacctgaccatcggggagcaggtggcggaaccccttgtcattcacgaaggggccggcaaaaaggaagcgcgggtacgcgcgctggaacagcttgctctggcaggcataccggatgcggaacagcgcatggacgcatatccccaccaattctccggcggcatgcgccagcgcgtgatgattgccatggccctcatcaccaggccggaaatactcatcgcggatgaacccaccaccgcccttgacgttactgtccagaagcaggtgctggatctcatcagaaaacttcagcaggacatgggcacctccgtcatcctcatcacacatgacctcggcgtggtgcgccaatacgcggaccgcatcaacgtcatgtatgcaggccgcatcgtggaaagcgccccggcgaaggaacttctggaacatccccggcatgcctacaccagagccctgatgaaatccattcccgggctgcatgcgaaaggcgcccccctctataccattcccggactgcctcccaacatgactcaggaaccatgcggatgcagcttccgccccaggaacaccctcggaaacccggcactctgcctcacggaccgggaaccggagctggtggaaatatctccggggcactcagtccagaattgtccgggctgcctggcttagcttcctttctttcctgcctgtttgcacgcagataatgccgcgcacaggaaaaatggaaaacaaagcgtcaataacggtggttaccccatcgctctccagagaaaaacaacaggtttggcaatcaagagaaaaaactctcttcattcgcccgcccacgttaaggaaatctctaaaggcctgccctctgccatgacattttaacgtgctcagcacctgttggaaccacgccacggaaaaccctttaacagaattgatttccgcacaattcttccagaataccgtaaaaacggcccacatgcaccccgtccaccagcacatggttcgcctgaatggccacgggcatcaccatcctgccggaagcatccgcctccatcttcccccaatggatgaggggaaagtattgtccccgaaacactctgtaggcactggccacctgtgtgaatggaatccacggcaggcagctgaatacggcgatatccgccctatggcacggattcgcctgggcgggagcaagtttggcagcctgcacaagaggaacggcatgtttcaggaaatcagacaactccatccggtattccactaaaatctgagtgaattctccatccgcagccagcaccggaaccagggcatccacggactcatactcccatacatccccttcctccacccgctggcgcagctggggcaccctgttcaacgccttcagcagcacaaacaggcacaaaatgaaaaaggaaaccccctcccgtttcgcataacggtacagggcatccacccggaccggggacgtaatggaaaacatggggcagtcaaacgtctggaaatactcataatgagaccttcgaggccaggaagagatttttattttctttttcatgcacttattttctattcaggggaggcgccccgtacacgtttttgcgtttttgctccggaagcaaaatactgaacaggacgggagcagtcaaggtggcgatgcccgtaaatatcccccccacaggatgccagcaaaaagacattaccagaagctttccctcaaaaaagcaaatcaggagggcgatccacaccggccaggttatcgccagccagcccccatccagtccggcatcatgaaaacgcctcacccccagcgaaatgaaacaaaataaaaagaaaaacagcagcaacagtcccagcaaaaaagcaaaaagtattccgaaaggaagggattcaaaccaaacgctggctccacaaaaacacgccagccatacgggaggagcaaacaccagaagcgccccataggcaacaaccgcctcccagcgcgaagaacgcccccgcatcgccaacagggaaaacagccaattaaaatgaggcttcctgccgcacctccatactttgccaggtttcatccactcctcagttccggcatcttgttccttgaaagactgccattccggcggagttccggaaacatcccctacccatatccagtcctccgaatgttcttcccggaccatcagccccagcggcaatccggcatagcgtatttcccgaatcaaaaaatcgacatcgaccggtccatgcaattccccatccggcgtatggtaataataacgtttcacaacagcttctttccttccattattccccggctctaccggaaattccagcccggctgttcccagcgccaaagcattgattaatgcttctatttattcaattatcaactatgttgcaacaaagaacatcctgaatgccccctacccctcgcgaatggaaagcaaatccgttacggacgcatgcttcatgcgccacgcaggcagaaggcacgccaaggatgagagggcaagcaccaaaagcacagcacaggccaggtgcgcccagggcatcgtgacaggaggagtaacgacgccgaagtgatagccgtattccaaaatctggatggagcaccaggcgcccaggactcccagcacaagactcatgacaacggagcacagggaaaccatcagcgtttccgcccaaagcatccgcatcaccatgccgcccggcacgcccaccgcacgcatcaatccaaattcccggcggcgggactgcacggaagccaggacggtgttaagtacagccagaacggcgatcaccatcatgatgatgggaagcttgctcatcgtaaaaatcacatcgtccccacggctggtaacgcttcctcccaggctttcccgggtcagggccttcaccagaggcttggcgccttcccctccgttttcctgctcccgcactttcatcagggcgtattcccccaggtcgttctgaagttccacattgctgatccccggagcagtatccccccagataaactggaatccctgatgagcgtattcctctttgagccagcgttcatcggcaatcgccaaagcggcaacaaaacccccgcggcgcacgcgcattccgctggtcttggtcaaccaatgccagccggggaaggaaactattcccgccaccttccagggttctccccgtacggcggcccccctgccccggccgcgaataccggcagagggctcatttccggaacggagttcccgggaagacggattaaccagcatcaagtcatccccgaccttcaaccccaccgtccgtgcaaacgtatccggaatcaggagagaacgggtggattccagcatggcataagcctcctgcggatttccggaaacaaacacggggttgaacagcggatggctccccccggccatctccgccacgggaatgccggccagtacgatggaacggttgcgcatcccggaaaaaccgggggttttcatctgtgccggagcaatatccggttcatccacgtagatgggatacattcgggaattccgcaggctggggcgcgccatcagctccggaacatccgcagatttgaactccgtatgcaggaaggaaaccagggttccgggtgttgacgtatccggggaaaaaggaaccagcatggaatagccccatgtctgcacccccacaaaaagagagaggcccacagacatggatacggcagttcccacggaacggctgaggttgcggctgagctgcattttcaggaaagaatgcggaacgtgcagcagaaatccggtaatccatgccccggcccactccgtcacgcgcacgaaggtgggggccagaaacagcgcaccggctaccaggccggggtaacccagccagaaaaatatccatttgcgcgtttctacctccaggcccggcaacagcagggccgcaggctgaagacacacgcatgcgaggcccgccacgacagaccacacaggaacacggctcaccttcccgatgaatccggaggaaggaacggccgcttccagcggagactggcgggaagcgcgccacgcaggaatgatggaagccagcaaggccccgcccacagcgcatacggcggcggttaatactgtggatcaggtcagcacgggtacagaggcagagccttcctccagcaggtacaccaggaaaaagcctgcggccaaccctcccagcaatgccggaatgcacagaaaaatcccctctcctgcaatcagcagtgcaatttgcatgcgccccagccccagagcacgcatcagggccagtctgcgggcacgttcgctgacgccaatgctcagcgttgtgaaaataatgaaaatacaggaaaacaggacaagccagacggacatttccgcgctatccttctgtgaacgaacggaccggtcgctggaaagccgccggatgatggaatccgtatccgccaccgcagcggaagcctggaccagctcctgccggaaattctcagcaaattcctttttgtccaccccttccttgagctgaacgtaaatcaaattgggggcaaaaggctgccccgtaattttctcgcataccttcacgggcacaaaaagggaggaaaaagccgggccggacatgccgcccggccccataatgacgccgggggtggccttggcctgcttgacgatgcccacaatctttacgtcgtacacatgcgttcccacgcgcacgttcatgacagtccccactcccgcgctgaaatatttggcgcttccgctgcccagcaccccctccatggctgaggaggaagccatatccggccaaattccctctttcaattcataaagacactccacagcatggtttcccaccaggatggggctctggggaggaattcccatgcggtcgcgcgtctgctcgtcaaagctgccccgctcatttccgcagccgatttggaggcgcggcacctggcacgcggcgttcaccgtttccacaaggggagaggcggccagacgggcgggcagctccgggtcacggaactgcgggtactgtccgggaggaaggggccctttgggagactccggcaccaggcagaggtcataattccccatataggcctccgcatcattgtcaaactccctgaccagcgtatcatagctccccatcatccatacaatgaggctgacggagacaaggatggcgaacacgctaacagccatccggccggggttggcgcgcagatccctccaaatcagtttgaacagcaacgtcataaggcgtcattcagcgtacgttcatagaaggaggacaattccgcaggaccggcaaattccgctgtggatctgtcgtccacaatgctgccgtccttgagtacgattacacgatccgcccacatggctacgtccggcgcatgcgtcaccaggacaaaagcacaaccttgcgcacgatgcaaatcccggaacaaatctcccataagccgggtattttcagaatccagattgcccgtaggctcatccgccagcaccagagcgggaccggagaccaatgcacgggcaatcgctacgcgctgctgctccccgccgctgagcgtatccggcatggcatgccgacggtgagacagtccaaccttttcaatcatggcgtccagggcggcggaagccaccttcctgcctcccgccagggacggcaacagaatgttttcctccacgttcaaggtgcccaccaggttaaacatctggaaaatgaaccctacacggtcccgccggtacaccgtcagggaggcatccgacatggaaccgagatccatcccatccaccgtcaccgtgccggaatccggagccagcagccctcccagcacgttcagcagagtactttttccggagccgcttgcgcccatcacggcgacgaactctccccggttcacggtaaggctgatatctttcagcacagttatactcccggaaccggatttgaaaccgcgcttgagatggctgacggaaatgacgggggaactcatggcggaaacgcaaggttaaaacgtggtcttcaggcctacttcaaacgtgcgcggctctcccaccgtgcactgcacggcatggcgggtggactgcacgtactttttatcgaagatattatacacagccagcctcagcgtggcatctttcagccatttggattccggcagggggatttccaccgtaaagtcgaatacgctataggagggaatggtgtagttgtccgcaatttttgcgccccggaacgtagcgtagtaggaatccttgcagcggtagcccaagcccagcaccgtaccgttcagcaaccctccgtcaatgcggtacttctgccagagggccagagcattcggagcaatcgtgggatacacttccccggtggtccggttcttggtgcgggtgtaggtgtaggaaagataggaactccaattcttggttatttccccgttcagggaaagttccacgccttccgccctcttggagccgtccgaatagtaccggttggtatatccgtctatggcaacaggcgtattattctggatgatgtcaaaccaggaagcggaaaaccacaccttatcaaccgggctgacccggaacccgaattccatctggtccgtacgccaggaatcggtcaattccttcccgttttcatccagatacccgaagttgggggcggaagtacgggctgcgttggcgaacaacgctacgcgttcgccgaacatgcgggtaattccgaagcgggggctccacgcaaacgcataattattgtccaggctgaaatgcgcgtcaccgcgaacgccggccagaaaacgccactgtccataactgaggacatcctgcagcagaaaaccagccctctgcaccacggtatccgtcgcattggcgccggaataatcgcgccctgcagggaaaaaaggaggaggattgtacagggaaaaatagccgttcgtgtttgcggtggcgtttgtcaccaggctggaaccgtctccataagtgctgctccccgtgtaagaaacacccatcagggcttcatgcttcacctgcccggttttaaattccgccagtgcgttggaataaaaattccagttgatattccactcgtcgctccaggcggcttcatatttggcctttccggaagcaatcatctggttgtaataatccgccgtgctggttcctctccctgcggaagaggaaatgccccagacattatagtccacatcgctgtacccaataccgccgccaatgcggatcgtccatatcttttccagcttgcgttcgaaatccagcatcgccagcagggatttggaattaagccttccgctcggagaaccgtaccaggcgtcatacggccccacaaaatggccgcccagcacagggatgcccatggtcgtcggagaattctgatactggaaactggtcgtcagcaccgtcttggtgcgggaatcatgctgccagcggaaaatgggggacaccgtgtacttctggcctccgttggctccgttgctcagccagaacgggcgttcatactcggcggctaccaccgtacgcagggcaaatccattcgtttcatcccccctgtaccgggtatcgtcaatcgttgcgcggtatttctgcccgtgatgggaaaggcgggcgtaagccgtcaactccgtccgttccaggaaatcaggctccttcaggatcaggttgatggaaccgccggcgccgtatgccccgagcgtactggtctgaccgccggaaatagaaccaatggggcctttgacaatctcaatattttctatcagggacgtatccatgccataccccatgcctcgcgggaggggcatgttgccgatctgaacatcactgccggcaaagccgcggatggtgtactgatccgccgtacgggacaaaagcatgtccccacccgtattgacggaggaatccatacgcagcgcttccaccagggaatcgcaccccttggaatccatcaggtcccttgtaatgacgtttaccgtttgcggaacttcctccgtcttcatgttcgtaagagtagcggaactgaccgtttccgcccgcagggacctggaacggatggtcatcacgcgttccggcatttcctgcacgccttcctctgctgcggcgggctttgtctcggcataggcagattgtccgagaacaagcaggctcccaatggcggcggcacggtgcaagccgcgcccctggcggcgatggcggggggtattcatgttggataaacgcataggggcaagtataggacggaacaaagaaccgtccattcccgtttgttaacaatttgataacagaccgttccttttccttccggcaaaagcgcatctgatggcagaacggcctcgccctttcacaaacccaaagcctgcgcccggctctccgccgcggccttcagccattcccgcaatgcctccttatcccctgcagccagccaattcctcacttgtcccagctgggacagggcttcatccagacgctccagaacagcaggggcattttccgccagaatttcagcccacatggacggttcccccatggaaatgcgggtagtatcacggaaacctccggcggataccagccccagcagcttcacatccccaccgtccagggcgctgtggacgcacagggcggacaaagcatgaggtatgtgggaaatgcgtgccacggaagaatcatgatccgccgctttcatccggatgcagtggcagcccacacgctcccagaaccgctggagcaacagcagcacatcttcatgcacatgctcgtcattcgtcaggatgcaggtcgcatcccggaagaggtcccaggaagcatgctccataccctgcttttcggaaccggccatgggatgggagccgataaacgccacgccggctttcttcagcacggagcccacggcctggtgaacacaccccttcacggaacccacatccgttaccagtactcccggtttcaataaaggaagcatatcggaaacaaggcggggcatcacgccaaccggggtagccagcacaaccagatccgccccctccaccacctcttccatccgggtggaagcggcatgggcggctccggaagaacgggcatattccaacggttcttccctcctgccccacaagcgcacgtgcacatgcggcaactgcttcctgacggccagcgccaggacccgcccagaaggccggggccgagaatggcgacggaggagaaaaaaagctgctttctggaatattctctcatggatttacaggggaatacatcagcgccccggaacatcggcatgttcaggggcgcggcgtgatctcgttgcggcggccgcatcagggcacgcggaatttcttgatctcgttggggaagttggtgtcccgcaacaccgtcccggagggatacggcttattggtgctcctgttcaaaatcttgatcttcttggtacggtcatacgggctgaccaccaccgtgggatccgccgtaggccacgccaccgggatggaagaagaagcgggaggttccacaggcctgggggcggcaatgccggaaccggcggagtcacccacgggattaggaacgacgggcttgggaacaacgggagccggaggcgtgatattgttggccccgcccaccatattgctgatggttccggaattggtccgggcggggtccgggttaaacccggaattctgcccggccatcgggtccagagaattttcacgctgaatatcattcaacaggctattgccctggacgcccatagcgccggacggatagacattttccgtaggataaatgccgatggggcgttcattcacgcgctccgtttcacaggaaggcagaagaattgcacctgcggccagcagcacgcctatcgtcggggaagtattcatataatctctcttcgggtgatagctttctgccagcatcctacggtcccgcaacctcatgtcaaccataaagcctgtttgccgaacctcttcatgacaaggaatcttcggcttccgtccccgcacgcgggcaaagccgcccgaacagacgcgctcgccgcatttcttttacccatcggcagcgccggaacagccctggacggactcaacaaaaggaagagccggaaaacggcacaaagacggaacaaccatcactctttatcaacaagcgctccaacaggtactcctgccgcagccttattcggaagaagccggagctccattccgttcgccagcgggaagagacgcttccctcccgaacatgccgcgccggcctccggccctcccctgcccgccctcttcaaaaaaccggaaaaaacgcttccccctcttcccgggaacgcgcctgtacgggaacagattatccttccctaccccccatgatctgctacaatccgcttcacatggatgacgtacagacatctaagaaaaaaatgccctcaaaaaaggaatggaggggattttattccctgattctcattcaagcccagaacgctttcaatgaaaaagccgcccagttcctgctgattccgctgggcgtctggctggcttccaccaacgccgcatacggaccggattcctgggtcaactccctccagtacattctggcctgcatctttgttctgccctatattctgttctcccctttcgtcggatggttggcggactgcttctgcaaggcccgcatcatccaattcatgtctttcctacagattctggtactgggggccatgcttctgtgctataaatacgaaaacattgaaatggccgttttctggttctgcgtcttctccgtccaggcgaccatcctgagtccggccaaaaagggagtggtcaaggacatggtaggctcccggcagctgggctacgcttcagggctgatggaaatgagcctcatcctgtccatgctggcggcccagataggcatcttcgcctggttcgacatcctgcaagtctcctccaatgacggctgggaagcagccgctttccccacattcatcctcacctgcatcgccgttcccgtagccattgcgtccctttacctcccgcggtatccggccaaccagaccagaaaattcgaatggaagctcttttacgaacatttcgtgcagctcaagtatctctggagccagcgggatttgaggctcagcgaaatcggtgtttcctacttctggttcctggccggagccctgatgctcatctccctccagatcgcccaggaacaccccattgacggcaccggattcagcatgtccgcggccattctcatggcatggctcagcggcggcacggtggtaggcggcgtcatcgcctccatcatctgccgcaaaaagattgaactggggctcatccccctgggcgcaatcggcttcactatcgggtgcatgttcatgtccttcttcgcccccggctccctccccagcaacatcgggttcggcatcaccggggctttcgccgccgcgtacctggtgccgttaaacgcccacctccaggacaattgcgacccctccaaccgcagcaccgtaatcgccgccggcaacctgatggactgcctgatggggctggtggccgtcggcttccagctcatgctcaggaacatcttctccatccagaaccaattctgggttctggccgccctgggcgtcgtcattaccattgtggcattccggcttattccccgtgaattcatccgcatgatgggcctctggatcatgaggattgtctaccgctcccgcatcatccaccaggatcgcattccggaagacggcggggccgttatcgtctccaaccatgtcacctacggggatgcgctgttcctttctctcatttgcccgcgccccatccggttcatcgtggcggaggaattcgtagccatccgctggctcggctggattctggaactcttcaactgcctgcccatttcctcccgtaatccgcgggaatccctgtccaaggccatccaggccctgaaggccggagaagtcatctgcatcttcccggaaggccagctcacccgcacgggaaccctgtgcgccgcgcgccgggggctggaaatgctggcgaaaaaatcgcgctgccccatcgtgcccatttacatggacgaactatggggcagcatcttctcctactcaggcaaccgtttcttctccaaggcgcctctccgcgttccctaccgtttcaccgccgccatcggagagcccattgagcctgatgccgtcaatccccgcatggtcatcaacacgctgcgggagctatcctccacatgcctggaaattgcagccagcatcggcagggatgccatcctgaaccatctggagcgcatcgcccacaaaccgctggtcttctctaaaaacgcgcggctctccgggtatgaaatagcggaatgtctgatgaacgacaccgtggaagcagagcatccggaactcaggaaatggctgtccaccctgctggacagcacccgctcccaaagccgcctgtgcgacttctggatgaacgcccagcagctggaacgggtgaactccctccagccccgggaactgctgctcaccagcgtaggacgagaagaagtccacgaaacggtggccgccgtcctgtggcccatcctcaccagcactcccgtttacctcatcagcgacggggactacagtatgccggaaggcatcaggcagatagccggctccgatttcctgcgccgcaggctctacagcctggttccgaatacgcgcacgccgttttatgacttcagcggttcgggcgacctggttctccccaacatcggctggaggccctgcttcgccacggaccgcggcattatcctggccatgtccatgaagagaagcgtcttcaagctggatgacggcaccgtgcagctcggcatgcgggccaggacaagaggtcgcctcctccccggcttttacctgaatccccctctttccaacgtcatcgccggggctaccctctccaccccttattccctgccgcccaacctgtatctggacgagtcgggcttcctggcggaactccagtcttccaaccatgaacaataactcctcgtcaacccgccttcccatcccgcagtatgtaatgacgctggcgcacgcggcagccctgcggtcggaggacccgtaccgcaaggtgggagccgccgccctggatgcggacaaccgcgtcatcggcaccgcctacaacggactgtatcccggattcaaggctcaggacaccttctgggccagccgggaagaacgccagaaatacatgctgcatgcggaaatcaacctgtgcagcctgttccggaggggggaagccaaggtggtggcatgcactacgatgccctgtacctcatgcatgcaggcgctgtgcgcccatggcgtaaagaccatttattactgtgagccttatgacaaatccgaagctcctgccatcgccagcctttacggcgtggaactgatccaggttacggactatccgctcagtcggcacttcccccttgtcctggacagctgatgcccggaaaatcaatcccggtgcacgcggcatgtccaaccggccatggagcggggaacgccgtcaatggcagggtccaaatcaagcccggtttccgtaatggtgcccgaagtaatgacgcccgcattccgcccggcgtcgtcaaaggcaatgttcacattcgccatggtacaggcggagctgctgttggcagccggagcaatattcaatacgccggcattctccccgctattgaaccggtacgtataaaccccgtcgtacacggctcttgtatccattctgataacatccacgtcctgcccgctgaactggagctggaataagatgcttcctccctcaaacaggcttacctgctgtccgctcagggaagtgttcccgtcgtctccggattttcccgaacctccgccgcacccggacaacaatccgcacaccgtcacaggaatcagcaacaagacagggaacaactttttcatccccgggaaaatgcacaacagaaaaccacaagtcaagcacactcaactattattgcatttttccaacattttttaacatcacaaaaaaaccgcctgttttcacaggcggtctcaagaaaacacggaagcggtcagccaacccatttccaggtaatgggtatttcaatatcagggtgcaggctgtgcttgaccgggcagctcagagcagcctgttccagcagcttcctgtccggataatcggacggaagaggaacggtaatgacgacttccagcttgccgatacggcggggatccgcattcatgtgtttggccacttccaccgtcatgccttccagattaatccccttacgttcggcaacaatacccatgatcgtgctcatgcagccggcaagcgccgctcctaccaggtccgtgggggaaaaggactcgcccttgccgttgttgtccacgggggcatccgtggaaagcgtggccccggaaggttcatgaaccatggaacaatggaggccgccctcgtacgtcgttttagtttttaccatggccttattttatacaaggctccccgccatgcaacacacaaacattgaatccccccgttctttatggtaaccgcctttgctatgagaaactttttgaaagcagccgtcggctgcctgggcatgatcgccgggtgtttcagcacgggggaagcccaggacttcggaggcatgagtttcggggaagcgggaaactttggtccgccccagacatccggttcctccaaggccactgtcacctcctatggagaagcctccttcgtcatcgtgacggagctggcgctgccggactactggcacgtttactacaaaaatccgggaaccgtgggccttcccatggaagccgctctccagcctgtgcccggcttccgggtggaaggccccttctggcaaatcccggaactggggaaagggcttgtggatttttacggatacagcggaaaagccaaaatggcgttccgggtgactccggaaaaggatgcccccccggaagcgacgttcaccaccaccatgacatggcaaatgtgcgcggaacagtgcgccgccccggaaaccaaaaacttcagcgtcacactgaagcgcggagacgggcagacagcccctgacgcggcggaattgaccgggaacatggcagggcttgccgcccccgactgggcggaagggctgaaagcccggatttcccaggaagggaaaaccgtcaccctgcacctcaggacaaacggacgccccattccgcaggattccgtctattttttctgcaatcagggggaaatcaaccctaccactccccaaatcttcaaaaaactggatgactccaattatgagctgtccatgcaattcaacgacaccacggacggcctttaccccaacaacctgccggatgcagacagggggaaaccgctgaccagcctttccggcatcctgcgcgccggcagggaaggcatcatcatcaccgcggacgaccgccccttctccggggaatctcagtcaacagccgccggaacggaatccgccccggaatcttccgcttccatccccgctcctccgctgatgggcctgggggaaatcatgttcttcatgttcatcggcggcatcatcctcaatgtcatgccgtgcgtcttcccggtaatcggcctcaagattatgggattcgtccagctgggagggggggaacggaaaaaagtgctggcccactcccttaccttcgtactgggcatcctgatttctttctggctcattactgccattctgattgcactgaaagcgaacatgtttgactggagcaccccagccggccccggagtgttcagcggagacttctggctgggccgcggcgcggagggcgttgtcaactgggcgttctggtttgaaaacccctgggtgaatttctgcctgctgggcctgatgctcgccatggggctgagcatgttcggtgtctttgaaataggcgtcaaagccacgaccatgggcaacgacctccagcaccggaagggttatgccggctccttctggtccggcgccctggctacggtcatctccaccccgtgcagcgctccgttcctgggccaggctatcggcgcggccatgctccagccgccgctgggcatcgtgctctgcctgaccatgatggggcttggaatgtcccttccctacatcattctgggagcctttcccgtcctgaccagatacctgcccaaacccggcgcatggatggaatccttcaagcagtccatgtccttcctgatgttcggcaccgcagcctacttcctctggatttacatggccttctttgatacagaaaaccatcctcaggacatcctgttcctcttcttcgggcttgtgctgttttccatggccttttgggtatacggcagatggtgccccatgtaccgcaacagaaagtcccgcatcacgggaggcatcttctccgtaatcttcctgctggccggcctgtactacatgctcccgccggaaggagcagcctggttcggccgcggttccgcccccggggcggcggagtcctccgccgccgcagcaccctcccttcaggaggaaggaaacatctggataccctggagcccggaagccatgcaggccgccctggacggggggaaacctgtttatgtggacttcacggcccgctggtgctccacctgccaggtcaacaaggcctcctatacggatgaagtgctggccgctttcaaaaaatatggcatcgtcatgatgaaggcagacaagacccgcacgaaccccgccattgaccaggaacttaaaaacctggggcgcacggccgtccccgtcaatgccctgtatcttcccggcagaaaaccagccgtcaccagggaactcctgtccccggcctacctgctggaattcctggaaaaggaaatggaacgctaggacgtcttgtcatgcgggcggcaatccgccgccctccctccaggccatgccgggcagcaggaaaacggggaaagcttacccttccccgttcaacagcggcagcaacgcgtccgcccatgcctgataacccttctccgttaaatggacatgatccttgaacatgccctccctgaacgtcccgtccggcttcagcaggctgccgttaatggataaaatagtggtcctcggaagctcaagcctgcgtagcaaacggttaatctcctcctgcctcctgcgcaacgggctatcgggatcggggccgtagggagtcacctccatcaggatcaaacgggtctccggaaatctcttcagcaggcgtacggctatctcccggatgcccttcaccgtctgctccgcgggctgccgccctttccacaggccgatattattcgtcccggccagcaaaatgcaatagcgcggagaagtcctgactgccagtcccgtatcttccatgcgccacagcatgctgtccgtcctgtccccgctcactccgaagttgaccgccttcatcggcacgaacagcctcttccacagcgcggaaccttcccgttcccagcattctgtaatggaatcccccacgaacagaatgccgcattccttccccagcaaattttcccggaccgccttgtaacgggccggaacccacggctgggtattcagtttgggaacatcgggcggatccggaacctcatctgaaggtaccgcatacacggcagaagaagcaagggacagcaataaaaaagcggcagaaaaaacagaagcattcatcttcttccgaatacgcggcccggaaaagcattctttcccctgccgggaaaatcatgttctcaccgccttgcccaatacctccaggggctggccggacaaattcaattcctttaccagaaaacggacaatcagcaggcttgccagcgcatcatacaaagcgtcatgccaccggcgcgaaggaagcagagcctccacggaacaagtcagccccagggcgccgcacaaagaagacagggaataatccgccagaccgggaacgcacatccggcccagggccagcgtatccagccacgggccgaagccgtggcccggaaaccggcgcaggaacttccgttccgtggccggattatgccccaccaccacggcctgccccagccgggaacgtatctccggccacagggagggaaaagacggggcatccgccagcatctccgtagtaatgccgtgcacctgggaggcggactataaaaccggcttctccaccgcaatataggaagtccacaactcaggctcgtcctccaggcgagaacatgcggctatgcctatctggacgggctggtccgtctccccccgggccgctccggcggattcaaaatcaatggcggcgaaatgcaggccgccgattgtatccgaaagcagaggcatatcagaacaactccagctgagcatattccccggcaggcatatcgccttccatatccgtattcttggctctcggttccgccagccgggagcgctccttcctccgggggcgcgtggaattcatctccagatgggacaggatggccttggcgcggtgcacaatgacggcaggcatgccggccagtcgggccacctggatgccgtaggacttgtccgccgcccccggcacgatcttgcgcagaaacacgatttcctccttccactcgcgcacggccacattgtaattctgcacgccctgcctggaattggccaaatccgtcagctcatgataatgcgtggcgaacagggtgcgggacttcagctcgtcatgcaggtactccgccacggcccaggcaatggaaagcccgtcaaaagtggccgtgcctcgcccgatttcatccagaataatcagggagcgctccgtggcattattcagaatcagggaggtttcgctcatctccaccataaaggtggactggccgcgcgccaggtcgtcgctggctcccacgcggcagaaaatgcggtgcaccaaaccgatgtgggcggactccgccggcacatacgctccaatctgggccatcagcgtaatcagggccacctggcggatataggtgctcttgcccgccatattgggcccggtcagcagaataaggcggttttcctccggttccagaaaagcgtcattgggaacgaacacatcgccggaaacattctgctcaataacgggatgacggccattgacaatacgcagggtcatggaattgtccagaatggggcggcagtaccggtactgctgggccccctccgccaaccccagcagcacgtccaggtccgccatggcatccgccgtaatctggatatcgtcaatgtggcgccccacttcctcgcgcaacaggaggaactgctcatactccacctggcgggaacgctcgtccgcccccaggatggtattctccatctgcttgagttccggggtaataaagcgttccgcattcaccagcgtctgcttgcgctggtaatccgggggcactttatcgtaatggctcttcgttacttcaatgtaatagccgaagacgttattgaagcggattttcagggaatcaattcccgtgcgcttgcgctccttctcctgcagccgtgccagccactccttcccgtcgcgggaagccagacgcaattcgtccagaccggcatggtatccttccctgatgatgcctccctccttgatggtcacgggaggttcatccaccagggcgcgctggagcaaatccaccagctcatcaaagcagcccatgcgggaacggatgctctccagcatgtccccgccgccgggcagggattccagatcatccctgagcgcgggaatgcgcgccagggaggaagccagcgcctggaggtcgcgggcattcccggcgccctgggaaatgcgccccgtcagccgctccatgtcccgcacattcttcaggctctccctcagcttgctcatcaggtagggttcctgaagcagaacggcgatcacctcctgcctcgccaggagcttttccagatcgcacagggggtggagcagccagtcccggagtttgcgcgcgcccatgggggtgctcgtcctgtccagggtccccagcagggaaagcttcacgccgccgcgggaatccaccaagtccagattcctctggctggcctggtcaatcagcacggtgttctccgtggcgcgcacggaaatgcggcgcaagtggtgcgtggggcggcggagctggtagcccagataatggagcaccgcgccggacgcccccagggcggcggtcatctccccgcagccgaaaccgtccagggaatgcacccggaaatggttcagcaaattgggaatggccgtggaaggcagaaaagtatatccgtcgtaataaagcgtggggtgggttccggggaagcagtccgtctgctcgtcgctgaccaagagttcggagggattgatgcgggacagctcgtccagaagcaaatccatgtgttcgaactgggccacggaaaattcccccgtggtatggtgcacgcatgccaggccgaagcgctttttgtccttgtacaacgccacaatgtaattatggcgggaggaatccagcaaattcatatccgccagggttccggcggaaatcacgcgggtcagttcccgctccaccagcttgcccggctgcggaatggtggtctgctccgcaatagccacccgctttcctcccttcaccagccgtccgatatacccttccgcgctgtggtggggcaccccgcacatgggaatgccgtggcgcttggtcagcgtcaggcccaaaatggcggaggcctccttggcgtcctcaaaaaacatttcgtaaaaatcccccagccggaaaaacagcagcacgtcttccggcaagcccttcttcatgcgaaggtactgatccatcatcggggttgaggcaggtccggaactactcataaataacggtgaaagagtaatccgattgcggcttcaaggcaaggttggaatcttgttagaaccggggctccacgccccttttccaaggaaaagccagggaagaatcatccaaagccccgcaaagaaaatgcgttgcctctgccattatcgcgtcttttctcttcctctccggaaacaggccctcatgcggaagaacccggccatgcagactgccatctttttgcgaagcgcggcaaacaacaggccatttattccagaaaagaaaaaaccgtgccgcaaccggatgcggcacggtgtgaagtcagattggaggaattaatattccaccacgggggcatccttccacagggtgtccataccgtagaattcgcgcgtttcctgccccatgatgtgaaccatcacgtcaatgtagtccactacggaccacaatgccacaggcgtatcttccacataagtggggagggctcccgccttttcccggacggcttcttccagctcccggatgacggcgcgcagatgggggacggacaaccccgtgcacactaccatgaaatccgtcagggaagacatgccccgcaagtcgtacacccgcacattttcggccttggcgtcatccgcggcgcgggcgcacatcctggccagttccatcgcatcgttggctaccatattcgattcgtttctattgaattatttcttttctccgccgtccttgccgaactcatcaacgggattgtaggagaaggggtcccgttccgcctgttccagttcctcttccatcttccgttcttcagcgccgtccgcgcgggtctcttcagcttctttcttctcgttatggccggaatcatccttcccgggctgttcctccacttcggaaggcatggggggcggagtcaccctggcgggagggtttttcatttccccgtattccagaatatccatgacctgggaaccttccagcgtttcaaactccatcagggcctccgtcagaatgtccagcttgtcccggttttccgtcaggatggccatggcgcgttcataagcgctgtccaccaggaagcggacttccgagtcgatcagctcggccgtggattcggaataattgcgggaacgcgtccccaggtcgcgggcaatataaacttctccctggtgttctccgtactcaatcagccccagtttttcgctcatgccgaattcgcacaccatgcgccgcgccaggttggtggcgctcttgatgtctccggtagcgccgctggtcacatcaccaaaaacgatttgttcggcgcagcgcccgcccatcgccacgacgagctggtccagcatttcggaccggagctggtgcatcttgtcgtcggaaggaagccacatggtcatgccgagggccccgccgcggggaacaatggtcacccggtgcagcggctcgctgtgcggcgttttcaacaggcagatggcatgccccgcctcatgcacggcggtaatgcggcgcccccgttcgttaatcgccaggctgcggcgttcacgcccccagctgaccttgtcgcgggcttcttccaattcggcctccgtaatctccttcagacccttgcgggcggccaacagggcggcttcattgaccaggttggccagctgggcgccggaaaagccggacgtgccgcgggcaatccgctcaaagctgactccgggcgccatcttcacttttctggcatgcacctgcaggatctgttcgcgcccccggacgtccggcaggttcaccaccacctgccggtcgaagcggccgggacgcagcagggccgggtccaggatgtccgcacggttggtggcggcaatcacgattacattggagttgttttcaaaaccgtccatctccaccagcagggcgttcagcgtttgttcccgctcgtcattgccgccgcccatgccgtaaccgcgctggcggcccacggcgtcaatttcatcaatgaaaatcaggctgggcgccgtccttttggcctgttcaaacatatcgcggacacggcttgcacccacccccacgaacatttccacaaagtccgagccgctgatggaatagaaggaagcgttggactccccggcaatggcacgcgccagcagagtcttgcccgtaccgggcgccccgaccatcagcacgccgcggggaatggtggcgcccagatcgcggaatttttccggattgcgcaggaactccaccagttcccacacttcctccttggcttcgctgatgccggccacatccttgaacgtcaccttgttcttgtccggggagatgaggcgcgcccggcttttgccgaagctcatggccccccgggccccgccgctctgcgcgcggaacatgaagaacagaatcaccagaatgagcacgatgggcagcagattcagcagaatgccgccccaggaaccggattcacgtttgaacttcgtatccggccccagcagctgcttgacgcggtctccctggaactccagggtaaaaggcacttccacacgttcaaaacgctgtttgtccacggaggcgtctcccgtagccgcgggccagatgcgggtgacaatctgtccgaccagcacgttctggttgccgtcttccgccaggatgatgccgtcctttcctccggcgatgcggccttccagggccagacggttgaattcaggcacggaaagcttctgagctccctcaggaatgagggaaacattctttccctcttccgtccggtacgggctctccaccaccctgtagccggaaagttcattcagcaaaggcttgtcgcggtccggaagggacatggaataagtcagcgcaaagggggtcatttccaccttcggctgaatttccttcctgtacaccagcgcgtgaataacgccttcggaaccgttctcgctcagcaccacttccacgggggccttggggtcgttcagcaccacgcgccccgccttatactgggcttcaaaggattccagattttccttgcgggggcccaacccgaaagattcaggggtgaaaaagccaaacgcaaggacgcctacaatgagaagtaccatgacccacacgccccagttgggggattcgggcctgccggagccgggaaatttgggaggacggggaggactgggtggcattctgtcagacataatgtggttagcacacagaagttaatgaatagggcggcatgatacgcgagtccttgtaaaataaaacttttttccgagacatgccatacagccgccgcaggacgggcccgcaccgttccgggccggggctcttcccggcaataaggccttaaccggagcaggcctcattcccgctttctttttctgcgccgcccctcatggttcgcgctttctccgttcatgcgctgccggagacgccgcttccactggggcatcctttcttccgccggggccgcatgggaaccggcatcttcccggctcttttcctgccaggccccctcctcctgcgcggtcagccgctcccgccgcctctgctcctggatttccgccaattttctggcgcggcggatttccacccgcttgctcacctccccgtgggcggaggtcacgcgccaggggccgatacggcggggataggtaatgggcgcgcaaaccagttccgcatccagaaaacgcatggaccccaccagcaggttcttgacattcgccagcaggccgccgtccgtccagacgccgcccatgcccatttccagcagaaaggccagatgcagcgtctccgctcccgaggcctgaatggaaaaatccctcagggaaatgccctccgccggctcctcgtccggagcggccacggaagcggcccggaggaggaacatcgtatcccggaccttgcggctcagggcgcagaccagttcccccaccttgggccgggcgtcaaaacggtaatccttcacttccaccagccacagatcccggcgttccggatgatacagcagaaaatccatttccttgcatcccccgcagaaattctgcgcctgccgggcataataatccgaacattcaatgcggcacaccacgtagccttcatcgatccagaaacggtggacgccctccacgtaataagcttttgacggcttatgactcataactcagcttcaaatacctgtctgcctgttcgatttccgcttcaagagactcgataggtcccacgtcctccagggattccccccaggacacccttaccccggaacgttccccccgcggcacgctcatcccgaaaaactttctctgcaccatggcattgcggggttcggaaagctgaatcatcagctcccgcagcaggaacaggctgtgggaggacaaaataacctgcacccccgtcttggcaagccccgtcagggttttcaccagcacgggcaggtgggaggcgttcagattcatttccggttcatcccaaaacaggacggaaccttttttcacggaaccgttccggatcaggtagctcagcgttcccagccttttgaatccttccgccaccaggctcatttctatcggctgctgtccgggacgctgcaaaaagaaccgcccgtcacgcttcaccaccttccccccgatgattttttccagcctggcaaccacgcgcccggcatccgtactgatgggctccgcttccgcctccatatccagataacggcagaggtcccaactgccgccgtccagaaattcggggaatctgcttcccacctgcacaaaactcggataaatggtcagcacctcccgcgctgccaggaacaccaccggcacgttcagaaaacgccggggcatttcccggatgctcagcccctcctcttcatgccccgcctggaaatcaaacaccaggttccccatgccctccggcacgccgtccccctccatggaggcctccacgcgcgcatgggcgtttccccggttccgggccgtcagcccggccagcccgcgggacgcgaacacccgcatcaggtcttttctgagccgctgctcctccgcccatttttccggcagggattttctccccccgtcagcgctccacttggccacggtatagcataatttcagcaaatggcttttgccggaatcattgcctcccaccaccacattgattcccggaacaaactcaaaatgctctctcccgggaaacaccgtcacgccgctcaccagtaggtcatgtatcataccgttcccaatgtagcacagaagcgcaggccgtaaatgacaaaagccgccagctgccggccaccggggagcctgccggaaaaacaccggaaacaacggggaaaacgcatacggccgcagcaccgccccatcccccgcaggttccggacatacccggaaggcggcgcattttaggcttcccattgccgggcgccttattaaagtaatccgtatgagcgcacaatggaccaccgccagggaatacacggacatcaagtatgaaacaacggacaacggcagcatcgcaaaaatcacgatcaaccgcccccacgtccgcaatgcgttccgtcccctgaccgtgcatgaaatgctcaacgccctgaacgccgctcatgaagaccccaaggtgggcgtggtcatcctgaccggggaaggcccggacgctttctgctccggaggcgaccagaaagtgcgcggaaatgccggctacatcggtgaagacggcgtgccgcgcctgaacattctggacgtgcagcgcaccatccgcaccatgcccaagcccgtcgtcgccatggtggccggatacgccatcggcggaggtcacgtcctccacgtcgtctgtgacctcaccattgccgcggacaacgccaaattcggacagacagggcccaaagtgggctcttttgacggaggcctcggctcctcctacctggcgcgcattgtgggccagaaaaaagcgcgggaaatctggtacctgtgcaggcagtacgatgcccggcaggcgctggacatgggcctggtcaataccgtggttcccctggaggacctggaggaggaaacgctctcctggtgccgccagatgctccgccacagccctctggccctgcgctgcctgaaggcatccctgaacgccgactgcgacgggcagatgggcctgctggacctggccggcaacgccaccctgctctattatatgagcgaggaagcgaaggaaggcaaaaacgccttcgttgaaaaacgcgctccggatttttccaaattccccagacttccgtaacctccccctcctccgcaccatggcacccagctccgacaatgaaggcgccccccggaacggcaccgccggcagggaatccctgcgcgacctgccggaacatgaaaacatcgtggagcatttctacgatccggaagatcagggctcccgggaaaaacccgtccgtgaaaaaacgcctttctccctgataggcaatctcatcttcctgctgaccatagccattctggccgctattgcctggctggtttactcctcctggtgcccgcagaaaacggacgacctgcccggcttccgccaaagggaaaatgccccggatatccccagaatcctgaaacaggccatcaacagggacgcctccgtctcgttctcggaagaagacatcaaccgctacctggcttcctccatccatccccagcagcacggcgccctggccatcttcgccaccaacccggcggctggcatccgtctgcacggcggcaaggaacggccggacggaaccatcggggaaggatacatggaaatcatcatcgaacgctatacgggcatcgactcccgccagacgatttccctgttcctgacgcccttccaatccctggacccgcacaattacatggcggtgcagacccgcttcagattctacaatgacgaaacgctgccgggaggaatccacgtggggggcaccatcggcagcctttccgttccccagggttacatgatttttctcctgcccgcgtttgaaaacctgctccaggcctacctgccgcttatccacatgatcgaagaaagcggcatgggcatccatatcagtgaaggcaggctgaacctgacgcctccgcaaaagcgcacgctgtagcggaagaccgcagggccttcggcaatcaccggatgccctgccgggcaattcccccttccggccccggcattcaatttttctccagatccctgaccatcaaagtcatatactcctcaggccaggaatgggtaatctgacccgcatcattgaaaactgccaccaggcggatggaatccctcccatctgaaagcaccagcacggtttcatccttttcaaaatcataacggggcttgcccaatttgaatgccgcactcctgcggtccgtcctcagccacgcgcgcgcctgctccatcgtcaggccacgcagcgcccgggcatccctgaaaacgcgccgcgccgcattcatcgccgcagggctggaaaccaccatgccatcccggaacgggcgggttccccacatgcggtcaatatcccggtccagcgcgccgcccatccccccggaaaggaaaaacacggctacgggccaagccaggaaaatacccgcagcccatattgccagccgtttgcggcttctggaaagagccgctattccctgggctattttcccccatttttctaccagttcccggtccgcatgcccgaacaggaaattcacctgcctgcgttctatgccgccccgcagttcagccaccgtctttcccttttcgggcgccagatcctccagcgtagggcttccttccacgaagtggcggaaaatcctgggccacagcacgggaataaccgcaaaccggattgcaagcagaaccaggctgcccaccaggcagccgcttatcaacagaatgtcaaacgaacggctgaaaaaatagtccggattccacatccagataaaaggagccgccagatacatccccagggaaaacaggcaccatgaccaggctatggcggaaaaacggctggccgccacaaccacccccagcaggaacaaaaaggcccccagggcaatcccccacggaaacgccccgtaaatggcggccggaaaagccagaatcatcaatgccgtacccgcgggctgccgaactttttgcatatccggaacatagcacaagcccttgaaagcatcaagaaaggaagcccccgcagtcacacagggactgttcatcctcccccgccttacttcagccagccatattccatgatgagggccgcttccacctccgcattcttggaagcttcattatccaggtcagcatacattttcctgatatccttcctctgttccagatattcatctccggaaacggataatctggactccttgaacgcgatttccttcatcagcaccccctgccagagctcaaacctcctgcggctctccagcaacgcggctatcttgatgcgccgccgctgcagttccatcaccacttcgcgctgcagcagttcgtggctttctttggccgacttatactggaaccaggatgtcaggcgcgtatccagttcttcccgcaggctcatgttcaccttcatatcgcccgctcccgcaaaaaaaccgccgtacgtcccgcccgtgctggaaaacagggttgggctgtaaaaattaatatccacggacgggaagaacttcagtttggcattcagcacctggaggcgggaagcttccagctccatggccaccatcgtcaccaccagcagatccagctgccgggacgccgccctgtacctgccccagtccagcctgggcatcgtttcagggttcaccagccaccgggcgtccatattccccagcaacacggcaaacccctgggaaatctcattcaaatcccgctcccgttccaggtccagcttctttttctggacgccatcatcgtcataaggcagggagctcagctggttattgtagctgatctgcgcgttccggtaggaaagcacctgctggtacaatctggccaccagctccctttttttcatctccagcgtcttttccgccgtataaacagccgccttggcggaataataatcaaacgggatctgggtgagggacggcatgttgaacagaatgttcgtattgtattccacatcgctggccgtcaccttggccaggtcgctcaattccttggtcagcatccagtccagattgactccggggataatctgggtaaaaacattaacgacggaacgtttcgtcgtcttgagggactgctccgattttttcaagtcaatgttccgctccatcatcatcgccagggcctggtgccatgagatttccttccgcggcagctgccgccaatcgggaacggcatccatcctggccatcaattcccccgcctttttttccatgtgcctgtccacggagcaggaggcgcataccgccgcacagagacagaagcacaacgcagccctcagccatgccctttcaaacagggaaaacaggaaagaacggacaacaggaggaaacgggaacatacaggccccttgttacatagcttctgcccctgaaaagtcaagcatcaacacggctggcggggaaagaaggaaaaagaagtcctggagcgcagggaattcggtttttcctctccccgtgtaaaaaatacctccctcctgattcctatcttgacaaatcatgtgtgatatcacagtttatcggaaaattattatccttttatgacgcgtccttttcttacctctttgtctgcggcctgctgctccctcggcattcttacgctggcccaatgcggcggaagcagttccgatgccgaaggcctggcgccttccaccatcggcagcaaagtgttaaacatgcaggtaacaggcattacggatgccgccataacgcttcccgccatttttgacatgaccaccggtgacaacggggcgttcatcgtccagacgcaaggggaagacatgaacatgtggaacggggcaggcatttattcctacatcaaaaccggaaaaaacaccgcggaactgagcctgtcctacaacagaaacagcggttcgtcctcggaacccaacaccctcatgagcaccatcaggattccccagttaacctttgagaacgccacccatgcttcttccggggaaggcggcgccagcatttcctacatgcaagcggaagataggacacccattcccatcgacggcatcaccatcagcgtcaacatcatatcccagtcataaacaaattctttcctttatccatcaaaccatgaattcccgcttttacattcccgctttgattactctcgggcttgggatcctttccggctgcggcggatccagttccagcgaacaggcctatcttcccatcggtcttcagcgcactctggacattacgcttccggatggtcgtccttacgtcttctccttcatcatcgcctcagaaagcaccgcctctatttacaccggaaccagtccggccgcctcaacggcatccattcatgtcgtcaactacaagccttcctccgactctgcggaacaaataggcttttactggtcgtccaatgacggggaaacaaccagcaatctggacgcccttgtcgttctgtataatccccacaacatttccaaaggcctcggttcagccacctgcagcgtcagagacgccgaatatactgagacggagatccagcaggataactgccaggcggtcatcagggaattcagagtaccccccagctctgatcaataagccctttcttcctacctcccttcccgcccccatggcgggaagggattttttttaccctggtctctcgccggaacagagacgaactttccccagacatgccggaacgcagacaaaaccgggagcagccccgaagccccatcacttacttgagcaccttccctatggggcggcaggcggaaaaggcaaccggaatggaggaaagaagaacacaccccgccagggaaattcccagcagccacaaatcctgccgtatatcggcataagtcaggacggagtttcccagcttaaagaattcccccaacacgattctctgggttttcatgaacgcccagacggctcccgcaaaggaaacgccaatcagaaacgcgttttccacgataaacgccataatcagcaatacagggcgcaccccaaagctcttcatcagcgtatagacatattcattctgacggaatcccatggatgccagggctgtaagcagaatgccgacgatcaccgcgatgccgagggaaaaccccgtcctgcactccgtctggttgcccatcagcacttccagcctgtcaagcagccctacgtgagtctgaaccatggtcatgctgccgtcataacgaaccatgttgttcagcacttcttctatgctccgaatgcgggccgccgtcatttcatgcacccggatgatgtagcggcaattttccacgggaacctcctgcccggaactgaaagttccttccggggccaaaatgactccggaaggatacagcctgcccagcaaatgcccctccggcagaggggaggcattcagggaaaaatcaaaatccgctatggtaaccgtacaaggccccgcctgcaacgggctccgggagggattgtacagaaggacggtagccacgtcctccaacccaagcgcggaaagaaaggaacaggactccatgttgtattccaggatggggaatactgtcttgcccacgcgcgccacgcccgcacgggcatcattcagcaccaggacatcgcagccatacagggaaggcagttcatgctgcagcaaatttttcttggaaggctccccgtcgcgcacggtatcaaaaacaataatcagatccgccccgttcttcctgatttcatcatgcagcattttggcggagaggacataattggcgagaaaagagagagcgcacagggaaaggaagaaggccaccagaatccgtgaaagggggctggccgggcgttccttccaacggtggagagtatctttaaagagatacagacaggttaaaatcaatgatttcatgggtcaggtcaaacagccgggaatcatgcgtgctcaaaatgcaaattttgtcagcagggtactccctgatcaaatttttaatgatttccgtattgccgtcatccaggccggaagtaggttcatccagcagcagcacatcggaatccttcatcatcgtgcgggcaagagccgcccgctgggcctggccgccggacaagctccccgcctttttatgcctcagagattccaggcccaggcgggcaatcaaatcatccgccctccgcgtccactgcttttttggcagcatggccatttccgcgcataattgaaggtttctctccaccgtagccaggggaaggagattgagcccctggaacatgtaactcacctccttgcgccggtagagggaatccgcctgaaccttccggcggggggtaatcacgcgcccgcgctgcgggctcagataccccgccagaatctttaacagcgtcgttttcccgcatccggaataccccttcaaaatggtgattccggaagtgaacaccctgttgtaattttcaaaaatccactgcttgcctgaataactgaaacagactgattcgcacagcaatttcatttttttcgaacaatcaattccgtttccccattcaccaccagctccatatccggatgcactttttcaagaagttcctgccaggacgaacatttttttccttccggcagggaagccagcctcaccttgttgagatgaaacacttctccctgcggcatgtaataaagacgggccgtgcagttggaacccagcatggaatgggcgcgcgcatgctcctgacggggcagacggaaaaaatacgccagcaattccccgccgccggaaacattcttctccacccgcttgaaggcaaaagcccccttcagggcggaaccgtcgcccagagggacggacagggaaagggattccggcggcagattcgtcaaatcagggtccgaaatggaaatggtcagataataagaggagtcatcgcacacggtcgcaatcggggacgcggcgtccatgtacagggctacgctgttatccggcggaatggaaaactggtactgcagcttcccgtcaaaaggcattctgaggatatatttttcctccttcttgcgaaaatccagacgcggcttgtcctccaccagggacaactcccttttggaaagctcaatcttgtctttcaaagcccggatggccctttccccgccttccgcctgcttgctggcatattgccgttcctccctcgtcagggaagagtagaattctatctcttcaagctgtttttccagctttgacaactcttcctccttggcgatgcggttcttcaggattttgacctccagctccttgcgctccagctcaatttcatcttcattgaccgttgcaataatggtatccttctgaacgcgcccgtccgcaggaatccagttgctgacaactccatcggccggcatgacaaaggagcgcagcctttccgggacgatcttggcgcggaaagtcttgatgaaacaggcatctttcgatgccgccatatcagcccccccgccggccgattccgcattccagacacaaagagccagccccgagcacagccagatgccccaaagacatttctttgcccttccgaccataatttcaaacaggcctgccccccccgtttcacggcagcaaagccccgtcataaatgatcagaactcaggataccgtgtaactcaccgttccttccgtagcggtccagtcctgcgcttcaacctcgccttcatcattctcaacgggaacctggtaaatgatggaaccggtgaacgtcccgccacagctctcacgttcattggaagtgttgaaggaaatgttcgcatccacaaaggccttgtccctgtttgtcacgacaatcgggcccggagccgtccactgtccggaagtaatcgtgaagttccccctcagaatagcggatgagcccgtcctgcggtacactacggaagcaatgttcataggagcactttcattgctgcttgccgcattaatgcttacctggggaaggtccgaaccattgcccgtcaatttgacgataatattccacggccctagcccatcttccgtggaaagagaagcgctcaagtccagcatggtgccggaaggaaggctttccccgtcaccgctgctgccgctgcctccgcaggaaaagagtccaagggacaaggctgccgcggaaagggaagataatacgcacctgttcgtcaatcgggaaaacataaagaaaaagattttcttcaaggatagtgattccgtccggcgcgtcaacacataaataaaagaatatttggaggggccttccgttgttttgcggaatgcaccggggcttacggcccgctgccattccccggacgcgcacgccggattttccgctttgcggcggaaaatccagacgccaatccccacaggccgcaaacgtcatccggccctttccagcctgcgcttgaggacgcggcccgtgaccagcaggggggcagcccccatcaggaacaggaacagggaatccttccatggggtgggaaccgttccgtcatccgcgctgtatccggaatcccccggggacaggccggagcctccccagggcagaggctggcggcgggccaggaaaatttccggcctgtccagggcatcccggctgacgcgctggatttcggcggattcgtccagcatcacaacgcggtcattgacatagaaggatttaacggacggacggcccttgcccaggagttccaattccgcaatggtccgcctgtagcttttttccgaaccgccaagggcggccctccgcacctgccggacagcggctttagcctgttccgggccgtccgctccaatagccgcaatgtggagcagcgccatcttgagcagcttgaattcttcaaattccctgtcgtccagatgaaggcggcccttcaggtcgtccactttctcctggatggtttcacgctccctctcccatacatttttggacgcctgatccaccaccatcgtttcaaaggagtagcgcaaggggcagaattccgccaccagcggcacgcgccccggcttgaggcgcccgtgttcatccgtacggtgggcggaccatgggatgaactggttcatttcatcaaagcggacaatggctccggccatcaatatctggggaatcagaagcagaggcaccatgttaagcgccgccctctccgttctggcgaatacggaaaccagcagggacaggctcacgccgacaaaggccgtcagggtcatcgtccccaggtaaatcaggaacatttcatggatttccagaatggagttccccacccaaagaaacagggcggactgcacggcggaaagccccgtcagcaccagcgccttcgccagcacataaccggtcacgaataccttggcattgctctccctcttgagcagggcacggtccctgagcacttcgctggccgccccggtcaggccgaagaacatggccacaatggtcgccaggaacaggtaggaagggatgtggagggccgtggcaaacgtgtattccgggctggaagaggcgcgcagggtcacggaaatcagcagggccagcaccggcccttccagcagcatggtgtacagccccatacggctccgcacgcgccccaggaaggtgcgcacggcccagatgcggaaaagccgccagagctgtatgacgctgcgcctgggggcagggggaaattccagcgtgccttcatacagcgttctgggggcgcccccttcatgatgatgccccatcacgttgcggaaccggtagccttcaaagcgctcctgccacaggcgggggtgctgccgcctgcggcggtcgtgccaggagaggggggcttccagcacctcaaacacgtagtccgcgcctccggccgtccgcgcctcctcggatacgtcaatagccatgtccgctgccgccttccggaaataccgcatcatgcccggcacgtccccccagtaagccatctggccgccgtgattcagcaccagcactttgtggaactggttcagaataaccgtgctgggccggtgcatggtggcgattaccattttgtcgcggctcatgttctgcatggtctgcatgaccagcttggcatctgacgtggacaggccgctgataggttcgtccagcaggaaaacatccgcaatgcccgccaggtcaagccccaggttcaggcgcgtgcgctccccgtcggaaatggtgcgggcgttcatctcacccacgcggcgggaggcgatgtgcgtcaggcccagaaatttcaaaatagcgttcacgcgcctgacgcgttccgaccggctcagccgcggacggcgtatcatggtggcctgagagatgtgctcggaaacgctcatggccgcatccagaatatcttcccggggaatgaaggcgatgtagggccggataagatccggggcgctgtacagaagctggttgttgtaacggatgcagccccgggtgggcggcagctggccggccagcatggagagcagcgtgcttttcccggatccgctgggccccaggatgcacaccatttccccgcgtttcacggtcaggtcaatattgtccagcacgcgcccggagcgcaggaattccttggtcactccttccacgctgagggttctgatcgcatggtattcttcatccagcaccccggcggaaaaacggcagcgcagagcgtggtaggcattcaggtgcaccacgtccccatccctcagggaaacccttccccgaacaggccggccattgagcagcaggggcatggaggcctccaccacttccagccagccggaattggtggcgctggaaaaagaaacctccagcaccgctccgggggccagcccgggagtcagcagcatgtctcccttacgcgccttttccggcaggttggtcacccgcagcttgcggtttccgggatccaggcggaaacggcgcccgatgtccgacatggaattctgcacctcacccatggaaaaaggcccttccccgtccagcgtgaaggaggagtaataggccatgcgcacgttttcaccggggtacagccgtctcccgtcaaccgcgaattccacttccggcctcagcacctccacctcgcacgccagccccatgttcacgcgcacctcgctggcgcgggaacgcacccggctgatttgcagggagccgccgtccagggaaatatagcatacttcctgcttgcctgaacgcttgcagtccagaaaaaacgcgaagtcttcaaaactcagcggaccggacggcagcagcaccacctgcccgttggtcagcggcatcaccccgccgggctgcaaatggcgcccgcgcaccacaatgggacgggtgccgtcattcaccaccagcaccaggcgggaacaccggatcaggcgaaaggaaatgcccttgtcctgctccggaagggatacctctgcaccgatgccggaggaaaaaccgacgctgtacgccggttcctgggcttccacgtccggcgtcatcagcagctgcctcaggtggtttgccgtgcccggcagttccagaccgtacgtcacctggtcaaacagctcccctgtcatgcgggaatctcccgtattgatcagcagggaaagcacttccagagctatcgccatgcgttccgtctcatccctgccggaagctgcggaggccaggacatccgcaaccgtcaggctggccctcatgaaccgttcaaaacggttggaaagccagcggtgctccacttccgggaaagtatagcgcagaatatccagagcggcgtccgcatcacgggcgctcaaatggcggcgtccgcttaaaatagtggcgaacaagtccaccagcgttccggcatgcaccttcatggagccgtcgtcacggcgcagccacggcacgtaggcgcccagcgccctgaccagattcagcctccagtgaatcagcttggaaggaatgtcaaaaaaccattggatcatgcccggaaacgcgttgccggaacagtagtacagggattcccgccccatctcaagcgcaaccggaatttcacggagaaatgacaatattttctacagctttatcttgcaataggtccggaggaagtatagttctgtccaatgttcatgctttccgcgtgaaagctagccaaatacatcaacattatcacaacatggatattttagtttctactctttgtgacttcgccgccgactaccagggcaagctctgcatccagggcggctttgactccctggtcgcccgccagttcccggtcgtgcatcccgtctgcgccgttgccctgcgcatctgcctcactcctgaagacgaaggcacgcacgaactgggcctgagcatcgttgatgccgacggcacgccgctggacaaggaacgcatgcccatcaagatcaatttcccggttcccgctttcccggaaggagcctctttcttcacccgcaacctgatcatgaacttccagggcctgcgttttgaaaaaccgggcaactactccatcgacctgacagttgacggcgaactcgcctcccgcgtgcccttccgcgtagtgcaggtgcaggaagaagccgcccaggcctaagaaaccatcccctcttccatcaaaccgcctcccgttcatccggcaggcggttttttattggagcggccgtccgcccggaagtgcggaacagggcggccccggttccatgcacctgaaaacctctgcgcctggccccggcctaaaaaagggaggccggctttttgcgtcctccttccccctttttcattgcggttccgcaccggattgaccatgatacgggctgctccaacccgccatgcacaccgcacgcctccaatacgacaggattatcattacgggcgcatcatccggcttcggggaagcgtttgccggaacgctggccccccatacggcggaattggtgctcatcgcccggaatgaagccgccctgcgccagcttgccgccgccctggaaaaacgccattcaggccttcacgcctccgtccttccctgcgacctggcggacgaagcctccctgaatatgctcatttcccgcctggacagccttcctccgggaagaacccttctgattaacaacgccggcgccggtgattacggagatttctcggacggccgctgggaaaaaattcgttttctgctgcgcctgaacgtggaaagcctcacccgcctgtgccatgcgctggtcccctccatgaagaggaacggaggtgatatcatcaacctcagctccctaggagccctcctgcccattccggattttgccgtttatgcggccaccaaggcttatgtttccagcctgtcggaagcgctgcggctggaactgcgcgaacacggcatacgcgtgctggccgtctgcccgggcccggtttccacgggtttcggaaaagcggcgcgccgccccggcttcaccggaaacatgatgccggggcgcaacgcttttgacacgtccgttgaaaccgtcgtgaaagacagcctccgtgccctggcccgcggacgcgcccgggtcttccccggcatgaaaatacgactggccgccatgctgctggccgccgcccctctggggttgatacgccttttgatgggcaggcgcccccggaaagtcctgccggcatccaatgattctccttcttcagcatcatgaaagcgcaccgccgcagaataccccgcctcacctggttcaagctcgcagtctgcatctgcctggtagccatggcagcctccctgttcacgccgtaccccgcccagatcatacgcgccctgaaaggggagccggaacaggcgccgccggattccggaacctgtccgccccagaaatccccccccgcggaacaccccgggcaggaagaacagccaataaccgctgcaccatccgcctccggaaaggaacccggggatgaacggctgtacactccatggacgccggagcgcacaatcgccctccccccggtgcagtaccccccatttccccccgtgcttcccacaaggcctgcggaaggggccatgacccatatttatgaactggcccgcggcctgaacctgaaaacgcaggttaatttccggcccggcaccctggcctccagggacagggaaaccaaaagcaattaccagatgaccctttccctgaacgtcaaacagcccaaagcattgacgaaaaaggaagatattctgaagctcaatccgaaactggaacccatgcttcccggcctgtccaccctgttcaggcatgcgcgcgtctccccttactacgggcagatttacgtccgcaaacagacggaaatccgtaaaaacctggcctccctgctcaaacttctggatcgccataattattacgatacggagacgattctggaaaccacctatccggacacgggaaggaagcttctctggctgcaaagtgaaatggatgttgtttccgacggctcggacggggaccggctggccgccatgccggataaaatcctgaaaagctccttctatcagcccagcacttcctaccgctggaaaaagcgcacagacaagcccaatcccctgctcaaaccctggcagcagaggctggcttcctacaagaagacgctggaaaaagcccccgccgcggaaaaaacggctctgcgccgcaaaatagaccatgcggaacgggtcattgaggaactgaagcggtacagtttcctgatctcggaatacgatccgttcatcgtggttccgctgggagtcgtcaaccagtccactcccttctccccgcagttcggggactatgccgtcgtcatcgtgggagacaagttgtacccggccctggtgggagacgccgggccgcgctacaaaaccggggagggttccctgcgcctgagccgtgaaatcaaccccaaggcgggcccttacagccgccccgtctccgacctgaaggtaagttacctgattttccccggttccgcagagcccgaggccgggcctcccgactatgaaaaaattacggacagatgccgggaacttctcaacgaaataggcggcatggggaaaggattcaacctccaccagtgggaagacctgctggcgcccaagccaccgcccgccccaaaaccggaaagcggcggcacagcggaaacacctgcagataagcggaaaaaggaggaagcccccggaaacaagcctgctcctgctccggctccgccggcttccccgcaaactgctccggcttcatcagccgcaaaaagcgccgcataagctacagagcctctttccaggaaaaaagaaaggctttccacatccgtaaataaacgtctccgcgcgcaatcttcaccttcccggaagacggatgccgccgatccgcccgctggagcagttccagcgtgtccagccccagccaagcgggcaggacggtggaaaaacgcagccgcccgttccgcagagattccgcgtaaaacacgccttccttcagccagcgttccgcgcggtccagccatggacggtcatctggggcgggcaaatagcttcttccgcgggcgaggtcttcctcccggtcacgcaggatattcactaactgcagccccatgccatagtgcctgccccagcgcaaaagctgctcctccggctgcgtgctgaagcccggcccctgggccagcaagcccagcctgatccagaattcccctacgcatccggccaccatgtaagtataatgttccagctgttccgggcatgagacggcagcatggctttcaaaatacatcaaatcccacgcctgtccctccacgatggaggccagcacctgccgcaccagcatccgttcatgcggggaaaggttttccagcagcgccaggcattcggggaaacgggccagcaattccgcctccccccggtgcgtctggattgtggaaagaacgcccagacggccaaaacaggtggcggcaacctcccgggaggcagagccggccaccgtctcccccatcatcctcaaaagcgccaggcgctcccggcaatccatgtccacggcatccgccaccgtatccgtggcacgcgccagcagatagcccacggccacgccggggcgcatttcccggggcaggaagcgcatgctcagataaaaggatcgggagacggccgataaaagatggtcaaggcctttcatgatttctgcaggcccagcctgtgcatcttataatggagtacccgcggggaaatgcccagttcccgggccgcggcggacatattgcccggagaacgtttcaatgcggctacaatcaattcccgttcaaaggaatctaccatggtcggcaaatcggcgggagcctccccgtcacgggaataagggacatcatggctgggcatctggagggaggcgggaaggttgtaaccgtaaatgcagtcgtcctgcgccgtaatgacggcacgttccatgcagttttccagctcccggacgttgccgggccagtggtaagccatgagcatgttgatggcgggggtggacagccgtttgatatcctttccgtatttcaggttgaacttggaaagaaaatgttccgccagcagcatgacgtcccccttgcgtttggagaggtccggcataacaatggggaaaatgttcagccggtagtacaagtcttcccggaacttgttcgccgccatcagttcctccagattgcggctggtggcggcgatgaagcgcacgtctgcatgaagctccctgttgcttcccacgcgggaaaaggtcttttcctgaagaaagcgcagcagcttcacctgcatctggaggcttaaatccccgatttcatccagaaacagggtgccgccgtccgccgcctccgcccggccgatgcggcggctggtggccccggtaaaagaacccttttcatgaccaaacagctcgctttccagcaggttctccggcatagccgcacaattcagcgtgaccagcggcttatcctttctgccgctcagattcaccacggcgcgcgccaccagttccttccccgtcccggaacttccccgtatcagcaccgtggcatcgctgggcgccacctggcggatctgttcatacacctggagcatagtgctgcaattgccgatcaattcgcctggattagtcgtcaaaagctcccgcagtttttcattttccgcgaccagggcggcacgttcctcatgcgcctggaggctggcagccagagcatccccaacaatattgcctacaatctccaacagtttctgatcccgttccaggtcggtgtcccggtccacggcacggtcaatgctcaacgtgccgatgacctgctgcaaatgaatgatgggaacgcagatgaaggctactttttcaccgcttttgcgcgtgcgggtacggttcaggaacctggaatcccgggaaatatcctcaatcacatggggcctgcccgtttccgccacatgccccgtaatgccttcccccacatggtaatggccgcgtttcatttcctgctcgtccaggccgtgggaggcttcaatcatcaaatcgttcccgcggcggatggtgaacgtgccgcgcagcattttcatgcggcggtaaagcacgtccagaatatgccggagcaaagccgtgccgttgcgttcattgacaatggcggagctgatttctttcagcacgaccatctccaaatccggtgacctgtttatttcattcatgcaatccggggctgggcgaatattaaccgcacgcccccgccataccaactactttttcttccaccgccatgcagccgggcaaaaaaaacggcacggggaatatggataacataccagcaattaatgttgatgatattacgaacggggaacaaaagatttttacaaaaatgtaatatacatcccttgtttcgttccgttttacatgcccacgtctccgccggactcccgtttcatcatctccgtgataacctggaacaacgcgttgcggtacagcacgccgtccagccgaccggtattcttccagaccacgggaaaggcgggaagatgggtttgttcaaacagcttcaaggcatccgtcagataggtgccggcgtccagcacgggagcccccgtacgaaccagggacccggcatcggccggaaccgcccccttccgctcctccatctgccggcgaaccgccagaaagtcctccggatagatggccccttcataaatcccatccttattcaccacaaaaaccagatccccgggattccgcagcatcagggaggagacatcatccagggaagcatccggggccacctggggcaccacgtgccgcgccaggtcatgcacatggacttgcgccatgggcaggttgacgacggacgccggactgccggccaggctggcggcatacatggaacgcgcgcgaatcagttttcccgtgccataagcgcttacgacaccgatcagcaagggataaatcatctgtccgctcatggaaaactccaccaccatcaccagggccgtcaggggggcctgggcagctacggcgaaaaaggacgccatccccaccatcgcatacgccaccgtatggttgccctccattcccagggacgtcagaaccgtactgaagataaaacccaccatgctccccacgtacagggtgggcgtcatggctccgcccaccgtaccgcagccgaacaccaccgccacggcagacaccttcaccagaagcaggacgagcgcctcccgcgtgccgtaatcctcatgaaccagcccggtaatgagagcctgaccgttgcccaccacttccggataaaaaacggccagaatccccacgaccagcccggcggccgccaaacgcagcggcagaagggactggcggccattcaaatatctggcggccgcatccagcaaactgacccatcccctggccgccacggccgccgccgcccccagggcgatgcaccagagagactgggaaaagacagtaaagctttcaaacggggaactgtacaaaggggagggatcccccagcagatgcagcatcacgaacccggtacaggaggcaatgagcaggggggccagaatatccatgctcacggtaccgatgatgatttcactcacgaacaggcagccggaaaaaggggcatggaacgccgtcgtgaacccggctgccgctccgcagccgaccagcagccggagccgcggaatggacacgtgcagacgctgccccacagcagacgcaatcagggcggaagactggatgataggcccttccttgccgatggccgcgccggaagcgatgctccatgccgcggaaaaaactttcagggcggaggcccggaacttgatcagcccgttcccgatggacatggcctccatgtattccgtagcctgccccggcatccttttcttcaggaatagcagaatgcagccggccaccaggccgcccgccaccggaataaacatgcgccattccggctccaccagggaaaaggttcctacgcgggaatccgaccagatgccggtgagcatccactggatcacttccaccatccactcgaaaaacagagacatgcaggagcccaccatgccgacgagaacggcccatatataagtaacctgcctttcccccaccttccaatgatggaacagttttaaaatccatccgtaccagacggaatccggcggctgggactgggggagtggagaattcatagaaaagaaggcaatactattccattgtgacaaaaaaatacctccggctgttcgatacggaagaaaaaacggcccatccccatgcccctccggagccagagaagattttcaacggatacgcagacggctcttacgggcccccttcggggcctggcccccgcgccggtagtcagaacgtatatttcaaattgatgccgtaatagaaatcatcccccagccccttttgctttaccacggtcagcgcctggctgtaattggtgaacaattccacagtcaagcgcccggtagcacggaaggtaacgctcagattataatccagagcattggaaccatggtgcaccaccgggcctacataccccccattgtaaccgtagcgcactacggcatccacccgcacgcaatcagctatttcttcatgcatccccgcaaatacggcataataaccacggaacgtatggttgttatactgccagtacaggtccgcgccgccaaaccagcggtcggaaaaatggtaggtcgttttcaatccgggacgcgggattcccttatctcccggaaaaacaaagctgtgctcataccagggcatgaccgtccagttgcccaattccctgacgtagtccagccggtatttcagctccgcatgattccggtgatccgtggaaacgccgtaccatattttccccacccactctttatactgtatttcaggaacaaacatgcagagagaaccgtcccacaagtccaagccctcgcactcgtacttgctggcccaccccgcctgaaatcgcaaataaacacgctcatccgcaggaccggccagggaaagggggtgggggcatgccgtcttcaggtggtaggactgttcctggcagaccgccgtcgcccaggctccgggacacgccagcatgccggtgcaggccgccagcgacaacagaattacggtattcatcttcatattggtcatggctggaaatttttctgaaacggcatatccggaagcggcgccatccacccatgcgtacccgcatcccgctttagccgcaaacggatactacgcccgcacccggacaaataccttctaaagatgagaccagcatgaaaaaacaatattcagttccaagagccaaaaaaacgaattccccatgaaagattgtgtcagcagtctttgtacctataaccgtgtccatgaaattcattatccccgcactcgccctggccgcctgccttcccgcagccttctcacaagaacaaatcatcccgaaaccggcggaaatcacattgttcacaggaagtccggcccgtctcacaccggattccctcatcatcacggaaacacaggacaaagctttcctggatcaggcaggacaattgcagcagatgctcagcgcagggacgggactcccccttccccttaaaccggccgggcaagcgtcgaaaaaagccgcttgcattgtcatcaaaaaagacccagccctggccgccaggggagaagaagcctactccatccaatcatccccaagtagaatcatcctttccgcagccgatgccaggggcatcttttacgcggggcaaagcctgatccagatgatgccctccgtcttccacgaccggacggcggataaatccgccgtccggtggaatatttctgaaactccgttccgcataacggactacccgcgattctcctggcgggcgctgatgattgatgaagcacgccacttctttggcgagaaaaccattaaacagatcatcgaccaaatggctctgctgaaaatgaacatcctgcactggcacctgacggacgacacaggatggcgcattgaaatcaagaagtatccgcgcctgacctccatcggctccaaacgcagggaatcagaaatcggcacatggaacagcggcaagtcagacggaacgccgcatgaaggcttttatacccaggaacagatcagggatatcgtacaatacgcagcccgccgaaacatcaccatcgttccggaaattgaaatgccgggccatgccagcgccgccgccgtagcataccccttcctgagcctgaaaactcccggggaagtgcccacaacattcatcgtcaatacggccttcgatcccacctcggaaaaaacttatgccttcctgtccgatgttttggatgaagtcacggcgatcttccccggcagaatcatccacattggcggagatgaagtgcgctatgacaagcaatggaagggtgttccggaaattgaggaattcatgaaaaaaaacggtatgaaaagttatgcggacgtccagatgcatttcaccaaccgcatgtccggcattattgcccaaaaagggcgccgcatgatgggatggaatgaaatttacggacatgacgtcaatggggacggaggaggaaaagccggtgccaaactggatacaaacgccgtcatccaattctggaagggcaacaccagcctggctaaaaacgccatccgggacgggcatgacgttatcaattccctccacacctccacctatttggattacagctacggcagcattcccctgcaaaaggcatacggattcgaacccgttttccccgggttggaggaacagtaccattccagagtcaggggactgggcgcccaagtatggacggaatggatttccacaccggaacgcctgcactaccaggcattcccccgtgcctgcgcctttgcggaagtcggctggactcccgccggtaaaaaggattttccggatttcaaaaaacgcttgaaagcgtatagcgagcgtatggatctgatggggatcaagtttgcccggaacgtcatcagccaaatagacaaatctgactttttcaatacgcccaggatcggcacatggacgcctgccaccgtgacccgggaggaacattcgtttgacgttaccaaactggtcaaagcgtccggcaaacacaccgtcaccctgctgtacgacaaaggtgcccacgccatcgaaatcgaatccgtagccctgtatgaaaattcccgggaagtctcccgggacgcccatgcgggcaggagcggcgcccataaggaaaatatccagtacattctgaatgccccggaacccaggcaaggagcaacctatacggtcaaagcaaaattcaaaggggacggaggccgggattcccacgggacagtgtattttgaaacgccataaaaacacagcccccgtcccataccagaaacagcagggtcttcacatttactccgacaaacggagcacagcatccgcagactcatggttacggacacgagcctttcagtatcatcggcctcccaagggcgccggcatgttttttcatagaggaagacgcccccttccatcaagcggcacgaaattgatactttaaaccagaaaggcttaccctgaaatcagccttgccttaacaaggctccggaggtcgttgcttacgaacctccggaacctgaacaaccgtgaatcggcggaagatgattttcatccgggaaagccagacggaatttacatgttatcatctaccactttttccacatactggaaaaagatgcttccgtcctccccgctgatcccatagtctctgacatcctcaatattcgcattcttgattcgggtaataatatagactttggagtacaaaatcccccattccccatactttttcttatcaaaccagatatggtggttatagtatggttcaaaatagatggtgcccccgtctatcggatcggaaatcgggccggaatatttgacaacaatatggctgattcccttgtaacaccattccctgccgcattgaggatttttggaaagggtggtgctcatttcaatggtggtgtccatgacgtcataggacaacctatcctcatcatggtatttgattcctttttgaggcagattgaactgatttttgatgatgactccatcataaatgagacgtccccctttccattccgttttctgcggtactgtttcccctttcaagagacagattcctgagagagaaaccattattgcacaggcaattttattcattgttattttctactttgttgttgtttcagcaattccttattgaggaattctttcatttcctgaacagttttttcaggaggggtcttcgcatcgtcccgatattgcctccagtcgatgcgcagcttggccatcaggcgcaattcgctgagagaaaaaggaacagtacccggggcattcggcatgaaatcccgggacctgttgccaatataataaatctggctctgatcccaagaacgcttcatggtctcatcgaatgaagctctcacacggtcgtcgcttactctggcttcccactggaggcagtccgccaggcaaccaccctcggcccgactttcccgggcctgccgccacagggaaagaatatacctgttctgaagactgcacgcagccggagtcaggtacttgcgcgtatactgcaactcatacagaggcttgcacacagccttttccctctgtcccagagtagctccactcaccctttccggagtggggacaataccggccagagcaccggatacgtaataaggcagttcctcaggcattcgaatttcccacggtattttttcattcacaaacacgccgtttaaaatggtattaaaggaaccgttccggcaaatacggaacaggtaaatcccccctttcctgctcatgaaccttttataaactccggaccccgcaaatctggaaacgcgtgtgcgcgcctccaccgggtaggaataccactgctccatggatgcagcaagttccttccccaaattattctgttctcctatcgcaagatccccctcaatattgaactggaacacaaggggagcggtggaagggtgccttctggcttccaccacgtaatcccgcctggattcattggtgagataaccgttgggattgtaaaaatacagggctatttcatgaacaccttccggcacctctacggctacccatatatcgggtccgtccacaaagcccggatacacttctccgtggtcatcccactccgcctctgtccgcacggaatccgtagggtcgaaaagaacgttgcggttatcattttccttgatgctgtgcacccaccagcgcaaagcgtcccctttcttgcggttgagccccatcagcccctgaatccagtagggagacaaggcccctttgtatccgggatgtccgggaacggaagaaagggtacggaacttgataggcttggctttgaattcggaattgctcatgggggcattcgtggcgcacagcgtggcacgcgtgtgcccgtacttcccgcaccagtccccttttgtagtccagtcctccccccggaacacaatattcttccccgcatgcgcatcggaccccagcctttccaaccttctgagcaccacagaaggctcctccatctgcgccggacgagggaacgggacttcattgtccatctgttccctgtccagtttataagccagagtcccctttttcagacgaacaaagccccgtccgtatgtcgccgcccaaacactcccgtcctgaagcgccagcaaggaaggaacatccacgttttccaaacccttccttattctctgattcaccgtcattttttcagcatccagaacatccactccctgcatccggtagccgatgaaaatttcctttccctgctggataatggaagaaataaaatcttcagacaacattctggaattcgactcccccggcaccgcagtcttccgtgcggcagaaccatacagatggctgtttttctgggcataatcacgccctctcatataacgccaagaactaatgccgttactgtacgccaagcctgagcaggtacctaccaacacctggcccttatccgtacaagtcaaaacattgcagatattggaaggcaaaccatcaccatacggctggtacggctgacgggcgaattgcctgttatcccagtaccagggagcctgaacatttttccactgcatatactttgactggcgcgaagagcaggataccccgccgcaagcataggccagccacaaattccccctggtatcaaaacctgcggaagccgcctggtcttccaccaggccggtggacctgtccagcgtcttccatgaatcgcctgcaggatcgtaaatggatacgcctccggatgtggcgacggccacctccccggaaacgggagaaatggccaaagcataaacatgctctccattcagggcattgctgcggtcatacatcttccattcccttccgttaaaaacggctacgccgctgtcatccgtgcccgcccagatgcgaccctgcctgtcctccgcgatacaggtgaaattctttcctttggggaaaccggaataataatccatattaagccacgatttttcatatgtccgatccccaatctgaaggcggtaaatgctttctttttctcctacggcccaaatagagccgtcgccagctaccagcgtgccgcgaataaaacggaccggacattccggaagttgctccggtatctggacggttacgacctttcctgccgcccacgcccccaacaaaaggaaaatcaacacaaatgtccctacgaagtgtttgaatttaatcaacataaccaactatctcctgattattgcaggataatattatcggtttttatcactgtcaacgtcattttcaatttattgtcaagtttatccaaataaaatacagcataatccgtttagaattatacacataaaccatttaatatatgttagttatattaaaaacatcaattccaagaaaatcctcactaatacttttttatgcttggatgggaaaatacaggggacaggcctgacagcaacgtccggcattccgttttttcaacatgtttcccccggttattctctgattcaaatttcaaacctaccatgcgtttccccatataaagttatatttaccggccttttttgaggcaggagaataaacacagctcaagatccgaaggagaagccatctactcttccgaagcggcaataggaggcaatatggacgttcccgaaggagggcttcccgatgatggccaaagaaaaagaaagtgttgtcctcaccaacacgaacaattctcccggacctgattccagcaaccagttccggcatagtcacgcagcacccttccgacaatgaatgaggtattgcttcataaagcgggactgacggtcaactgtatattaaagccaccaaaggaaaggagggaggaaccagtccggcaggcggaaaagaagaaagcgaagacaaaaaagatggaagtaagcccccggttttctccctagatggcctatccgggcgatgataatagcggtctgcaggtttctgttgagccccaagccgggggtatgaaacgccgcctccctaaaagatgcggccaaattcacgacagatagaattatgccgtcccgtacgttccttcctcatacccaggtgccaattattacttctagataaaagggaaaaacaaacctccctgacctatccaacccctccggattatttctggagagggaggtgttccgttccacaacaaagaaaaggaacatattattctgcatccggcccatagcagaacagcctttccgccccggattacctccctggggctgttgaataccctgctgaaatatcgaaacgtatcaaataaacacttattaaagctccgcagccgtcaggtccacgcacaaaccttgacaactgcggagctgcgcttacacacacttattcatccaacaaaaatcgctcagcagagcttcttccatcaggaatggtggaaagccgttccttcttccgccgtcatcggagaagagaccgggtgtttctcgaagaaagagagcatgcgcttgtagtcttccaggaacaggtctgccaaatctttggagaagccctggcgaaccatgacgcgcatcaccaccgtatcctgacagttggcagggagcgtgaaggcgggcacctgccaaccgcgggttctcagcttgtccgaaaggtcaaagagcgtgtagttcgtacgggctccatccttgatgaagaagcagacggcgggaatacctttttccggatcgcccgtacaaatgaattcgtacggtccagtttggaaagctcatctgaaatgtacttcgctacctcgtaggcctgcgtatggatgttcgtatagccttccttgcccagtcggatgaaatcataatactggcagataatctgtccggccggtcgtgagaagttaatggcaaaattgggaatttccccgccaagatagttgacattgaagatcaacccttcaggcagttcggaaatatctctccaaacgacccagcccactccgagcggagccaatccgtatttatggccggaagcactgatggacttgacgcggggaatgcggaagtcaaagacaagatccggggcgcagaacggagcaaggaaaccgccgctggctccatctacatggatgtcaacgctgatgccggtcttgttttcataatcatccagggccttggcaatttccgccggcaattcataagcacccgtataggtcactccgaacgtgggaaccacaacgatggtgttctcatcaatctgttccagcatccggtcaacatccatcttccattttccgggcgccatcgggatttcacgcatttcaatatcccaatagcggcagaacttgtgccagcagatttggacagggccgcataccaggttgggcttgtcaatgggtttgccggcggctttccggcgggctctccagcgccacagggcggccatgcctccaagcatgcatgcttcactggaaccgatagtggaacaaccaataggcttttcattctggctggcattccaaagattggcaataatggcagcgcagcgcatctcaatagcggctgtctggggatattcatccttgtcaatcatgttcttgttaatgctgagattcatcagcatcctgacctgcttttcatcccaggtctggcagaaggttgcaagattctggcgggcattgccgtccagcatcaattcatcggacaccaattggaaagcgtcctccgcgcgcatcgcataatccgggaactcatccttggggagaaggttatctgcttccggagaaccgaaaatggaattttccgaccgggctgtatcgggtttttgatttggatcaaacatgacggtatctattgtttcatcgtttccgggccaaccgtgaaaggcaacccgcatgaaggatagaagcacccgcgaataaaagcgttcatatttccattgtcattatcctaggtataaatttcccggaaaaacacagaggcgagatttatttcatcattcattgatgactaaaaattatttaattgcaaatatctttataaaaactcgccaatatctccagataactttatgtatgacatctccatattatgacagttaagagaaacggacgttttcggatgcaattcccagacgggataatgtgttacccccctatcttaacaatacaacatccattggaaaaaactgtgtcacggacttttacggttcctgatgccgaggcgtgcatgcgcactttcagaaagggaaaaatacggattaacacgaatttccatcaaaaaaactgctgcacaacaataaaaccaacatcgtggaatcttccccgcttttcctgatgagcaacttctggtgcagacagggggaagaaatactcaacctataccgggttaatgccgtagcaagttacacccttttaagccacggctggcagcagaggtaccttctccccctccctgcactttttacccggtcaacaggcggcattccttcaagattacgcccgttcaattttccggaaggtatccttcacataaagtacatgcggataaagaatggaatccggagctactttgggatgattgaattccgctatttttcgcattccaacacgttgcatcacagcttgtgaagggaaattcacgcaagcagtaaaagaatataccctgtcaaagccgaatcgtgcaaaaccatgtttcaggcatgcacgggcgccttccgtagcgtatccgtacccccaggcttccggcacaagcctccagcctatttccacacacggtgtaaagtccgcttcaaaatcagcccaatgaaagccgagaaggccgatcaaggaaccggaatgtttcaattccactgcgtacaatccataccctctttcatccagttcttcccgcatacggttccacatggaaagagaatccttgtccgtcatgacaccgggaaaaaaacgcatcacctggggattggcgttcatagccgcaaaaaaaggccagtctttttcccgccactcccgtaacaccaggcgttcagattccggcaatgacagttttcctcccggcatggccttagttgtacatggaaagctctgtttccagctccgggcagcgattcacgcgaaaccgttcatccagttccagaatttggctatggcccaggctgtccttgatggtgagattgactttggaacgaccgggatacctttttagaatatcccgtatctgttccagattttttctcgtgtggcggaggggactgacaatgatattcagaggcccctgatccccggatttggatttgcgctttttgcctccaagtgggtcaatgctctgggcagccacgcttttggaggatgtacggtcatcctcccggatgttggctcgcacggagacgaaaacgcccggctccaagcctccctccatttcctgagccttttcataaacatccgaccacaacaacacttctatgctgccggtaaaatcttccaacgtcagaatggcgaattttctaccggccttgctgatttttggggtgacggaacgaaccatgccggcaatctggtgcttctgcttgagttcgtgtggttccagcgtgtcaatgagtcctatgcgggtatatttttccgcatcaatgacaccgcgcatggagtccaggggatggccgcaaaaataagcgcccaacagatccttttcatctcccatacgctgctccttggaccactccggaacggcaggttcatccttcaccctgggcgcttcaaaggtcatgtcaaacagagacccctgccccagagccttatccttatgtacctgggaagctccgctgagggccaggtccacacgttcgaacagaacacaacgcggctccagcgtccagtccagcgctcccgcacgaatcagggattccagaatctttttgttgacagatttggaatccagcctgttacaaatgtcctccatactggaaaattccccattcttctctctttcttccagaagaatctgcatagccccctctcccacgttcttaatggccgccagcccataacgcacggccagcttgccggagggcattttctcaggagtgaacttgagcatggatttattcacatcgggaggcaggatctcaatacccatgcgattggcttcctgaatgaacactccgattttgtcattgttcgcctcattagacatcagcccgcagaggaattccacagggaagtgggccttgagataggccgtccagtaggaaatatgcccgtagcaggcggagtgggatttattaaaaccatacccggcgaatttttcaatcttgtcaaagatagctgtagccgttttttcatcaatctggtttgttttccagcatccttccacaaagtgggccttttccttggccatcttcgccgggtctttcttgcccatggcgcgccgcagaaggtcggccccgccaagcgtatagccggccagcagcttggccgccgcctgcacctgttcctggtagatcatcacgccgtaggtttccccactgacctgttccagcaaaggatgctcatactccacctggcgcagtcccttcttcacttcaatcatttcatccataaactgcatggctcccggtcggtaaagagccagcaagtcaatgatgtcttcaattttctgaatcccgtaacggcggcaagtgtccaccataccgccggattccaattggaaaacccccatcgtatcccccctgttcagcaagtccagggtttcccggtcatccagagggacggaatccagtttgaactccggcacgcgccagcgggcgtattgctccgcatcatgcatgacggtcagtgttttcaaacccaggaagtccatcttcaaaagccccacttcataaatcgcgctcatgtcgcactgggcgacgacagcggcatggggatcggacagatcgtcacgggtgagggccacatgctcgtccaggggacggtcaccgatcacaacacctgccgcatgtacccccacgttgcggatcaagccttccaggcgggtcgcgtacccccacaattccgcatacccctcatcagaggcaatcaactccctcagctcctcgttactcttgtagctggactgaagagtcaccttggggccggtttcgataagtttggaaatacggtccccgtccgcataggacatatccatcacacgggctacgtccctgagtacggacttggcacccatggtgccgtacgtaataatgtgggaaacagcacgctctccgtatttctgccgaacataatcaattacttccggccggcgtgtctggcaaaagtcaatatcaatatccggagggctgacgcgttccggatttaggaaacgttcaaagattaatccgaatctcagaggatctatgttcgtgattttcatggcataagccaccaaggaaccggctgcggaaccgcgaccgggacctacgggaatgtcatgatccttggcccagttgatgaaatccgccgtaatcaggaaataggagggaaatttcaactggttgataattccaagttcataatccagacgatcgcgcaattccttatctgcagctacacgatcctttccgtaccgttcttccagccccttatagcatactttacgcaggtattcttcgcgcgacgacccgtccggcgtgccgaattcgggatatttctccgtactggtggaatccagtttgatggcaacattgcaccgttccgcaattttcaacgtattttccacggcctccggataatccttaaacacctcccgcatttcctctggagatttcaaatacacttccgtggaatagcgcatgcgttttggggaagccagtttttcgttggttccgatgcaaatcagaacatcgtgcatgtcgtgatcttccttcctgaggaagtgcacgtcattggtggcaacaatgggggtattggtcttgcgggcgatacgcaccagctccggcaggcattttttctgttcctccatgccatgatcctgaagctctacaaaaatattgtcgtccccaaaaatatcctttagcgccagaagggcttcctctgctttttcaggctggtcattgagcagccactcattaagctatccggcaatgcatgctgtacaacagatgaggccctcatggaattcccgcagggtttccatatccacgcggggtttataataaaagccttccaagtgggagcgggacaccagcttaaccagattctgccacccggtttcattttccgccagcaaaaggagatgtgtgtatttgcggcggccgggaagctgttttttcacgctgatgggcgtcggggaaaggtaaacctcgcaaccaaagataggctttacctcctgcttccgcggtccttccggatgctccttgttccaggcggccacggatttattgaggctgtttgtctccatgaccagttcaatggctccgaacaaattgccgtgatccgtaacagcaacggcgggcatccccatgcgggaacactcagcaatgaggtccttgatatggacggcgccgtccagcaacgaatattccgtgtgattgtgaaggtgtacgaaggaaccgggcatggatggatcctgtgagcggttaataaaggaaatcagcggtgaacagggcattcggccttcatggcttccacgcattcccggataaggtccgggccgcgataaacgaagccggtataaagctgcaccaggctggctccagccttgattttggcgacggcatccgccccgttcataatgcctccaacgccaatgatcggaatacgtcctttcaattcggaagcaaaagctccaataacttccgtgcaccgttccgtcagaggagcgccggacaggccgcctgcttcttcatgccgaggattgacctctaccccgacgcgggaaagagtcgtattcgtagcaataagaccatccagtccctcatccagaaaaacgcggctgagctccgcaatatgctcatctgtcacatcaggagccactttcataaaaatgggcacatggcgacccgtttccgcagccaggttggattgctccgatttcagggaagccagcagacgggcagcgggttccgccgcctgaaggtcgcgcaggcctggcgtattgggagaagagaaattgatggctatataatccgccacaggccaggccgcacgcagacaagtaaggtaatcctgggcggcatcctcattgggagttattttatttttcccaatattgacacccagaacaccgtgaaaacgagtggcggaacgaatgttttccactccggcggcaataccttcattgttaaatcccatccggttgataatagctttctggggaatcagccggaacaggcggggcttttcattgcccggttgcggccggggcgtcagcgtacccacttccacaaaaccgaatccggcctggccaaaagcgcttaccgtatccgcttccttgtccattccggcggcaagtcccacccggttggggaatttcatccccaggatttccacaggatcagaaggaacttcccccattactagaggcagtacacgcatcttttctgccaggcgcaacccccacaaggtcaccttgtgggcagtttccggattcatttggaataatacacttttagcggcggaatataaggcgggtgacacaatgcggggagtgtatcacaccctcttttagggtcaagaatgggaagcgtcttgccgggatgattttatccggtacaattccttgccatgaacaggaaggaatgcctctcatcctgccgtctgtacggtattgtagatatgggatatacagctgaacatcaactactccctgtaacagaaaaactattggcaggcggcctgcgcattctccagctaagggcaaaaaaccataacccggaacacattgaaaatatggggcgccagcttgcccccctgtgccgtaaatacggctgtcttttcatcatcaacgattatcctgaaattgccctgaacatcggcgcagacggcgtccatctgggacaggatgacggagacttggcatccgtaagggggctgctgggaaaggatgccgttataggacggtccacgcatagtcctgaacaggccctgggtgcatgtggagagcaggcggactatatcgggtttggccccttgttccccacgggtaccaaaccgggaagacaagccattggcctggaagacatcgtaagcgtacagcaacagctaccggaaaatttccctgtcttctgtatcggcggcatcaatgggaacacactgccctccgtactggaggcgggggcaaatagggtagtcatcgtttcctggctgcttacacaccccgacatcacgggaacagtcagaactctcagaaaagaactgggagaagcgtaacgaaaaacgcgcacctccatccatgttatccctgcctttcctcttcctccggagacagagccggacgggagatcagaaaaacggcggtattcacaatcatctgcaaaatgtgctcctgatccttcatccacggttccttttcttgaagatccatgcacgcgacatatttccccaacgtagcatggaagatggagctcatgatatgcgcatgccaagataaggaaagctcatcatcccacggacagaatctccggattcttgctatcatctcctggatagatggagcataaaattcatcatagatttttcttcccagatattccggctcctgcggcaaacgccacaataaacggacatgatccggccctcccaggctctcatccagaaatagccggaaagcaggttctataaatgcacgggcatacgccctcagggacggatgaagatccgcctctttcagcatcttcatgcgcgctttcatcagaggttccgcatattgtctgtaaacagccagatacagtccctccttattctcaaaatagtaaacgatagaagccagattaactcctgcttcagaagcgaccgccctcatggtcacgccattaaatcccctgagggcaaaaagcttctgtgcagcacggaggattttgccgctggtttccgcagaacggtcggactgggatttgcgggtagaagacatctcctcaacaatcagacaatgcgccgcctagcgggaagaacggcttgagccgatggcttttaccaactgttccatgttttgggaggactgaataggcttgccgtccttgtccaccagaatcatggtagggataccgcgtggagccaccttcttggcaagctccgtcaaatcctctttcaacaggataggccatggcatgttattggcagcagcccatttttgggcggcatccaggttctggtccagattgcacatgattacttccacatccggattatcctttaccaccctgttataggcctccacgctgtgaggcgcattccggcagcaaggaccgcaccagcttgcactgaaatacaaaatgaaatgcttgggattcaatttcccgtccctctttttaagtttgccgttttcaagcatgtaagtctttcccttcatctcttccgccacagggccggacggcatggacgaccattctgcaataggcttgccgataacttccttgtgttcctccagccatgcgcgatcttcatcggaaagcttttccagcggcatcgtaatgggctttttagccgtcgtcaccaatttgacggtcttcatattcagggctactggacgggcttccaccgtactgcctgtatttttattagtccaggtgcgaagggaaggatcatccgctgctccggaagaatccgcccaacagagagaggaccccatcatgaatgtggatgccaataagatacaccaagatgaaaatttcatacacataatgctaatatactatttcttatcttccatgtcgagaagctgattccaaaatttgcctggcccgggcatgtcccgggtcgcggcgcagggcttccgcggcagcggcagcggcctcacggtaccgcccattgcggtaaagcatcaccgcaagagtgaaaggaatatccgcatttcccttttccagggaagaacagttttccaaatcctgcaaagcctgctccagccggcccactttttcattcaacagagcacggttaaacaaagcacgaataaaggaaggctctatttttaaagcttcgttaaaggattccaaagctcccggctcatcattattttcaatctggcccagtcccaggagataccacagattggcatccctgggagccaagcgtacagcctcttgcatctgatccaccgcctcccggctgcggccttgagaagccaggaaaacggcataatcacggtgcaccacggatgaagtggcatcccatttcaaagctttggaaaaccacaattccgcagttttcacatccttacggctaatggctatctgggccagcttcatagctccggaaggctggtccgcctggtgcaaagcggcagcagtaagctccttcattcccggactgtccggaggcagggaatcccggagagcccattccgcctgcaagcgcacgactctgaacggatcattaagaagtttgcccgcagcaggattacccactcgccccatcactttggcggcggcggctcgcgtcagaggatccgggtccttaaccgccgccgcggccacttcctggacggcgggttcatgagcccatgcatccatcaaatccaataacgtagcgcgccatgcacccacttcctccctcttaaaacattccataagcagaggcaaaacatcttcctttccttcgtaggcatgctgaacggccctggtccgttccctgtactgcgccattttgggtttagctccgtaatatttctttaccgcctccgcagcccattcattgcttttttcctcgtggcacatggtacaggcattcggaatacccaactctacgctcagcaaaggatcaggagaattgaaagaatgatctctgcgggggttccgagccatatacaggctttccggcatatggcattccacacaccgggcacccatgctggactgaggacatggcgtatgcgtagccatgtcaataacgggagcttttacgccgtttaccgcttctccagtaccgtgacacctcaagcagagcgtattatcttcctgaggaagcttcagtgttcccgtatgcggatcatgacagtccaaacaggtcactcccgccttgcccatacggcttaacctcagaccagtctcgcaataatcctcatccctttgcatgccattgggccagaaaacgccgggctgcacgggaagcaccagttggaaatgattgtcaaagcggtcacctacggcaaaatcatgatcaaattcatccctccgggcatggcaggaagcgcagttatcatgaatctgctgtggcgtcagcttgttcctggtggaaatcatgcaacccgtccccgcctccggcttgtccagcagggggccgtggcattgaatgcaagtcactccgggttccgtccaggtagaagcataccgatctttaacaggatcataattcttatggaacaaagacatgtggcaccacgcgcactgcgtgttccaattcatgcctcgtcctgtccagtgcccccagtctcccggctggcgggactccttgccgaaaatatcaaaccattctttgcggttcacgtcccatgcagcgctcaaggtatgaaaaccgccgtccttggcaggaaccagatactgcaccaggggaattctccctgtggcccattccgcgcgccaggaggttgaagactgaccgtcatggaccatgcgcccgtgaccattcgtagagaattggagaatgctgccatgagcgtccagcttcatgttatggaacgcttcagattcccattgatctcccagtttgcggaatgcccaggcatggtctgaaccggcccactgacggaattccttttcatgacatgctccgcactgcatggaaataggcacctcattctggtcccagtgctcactgcctcctgaaaaaacaaccggctgcgctgccgctccagaacgtttgtccatccaggccttcaccattgtgcccagtccgatcaaagccccaagaacaacgaggagaaccacccatttcttcatggaagggcggttcacaggggcatcagcagattcaggggcggacatggcggaaatattctgccatatcatacgcgctccaccaaggaacttttacatcaggcagcacagtccttgacatgcccagtccgtaaacggcagattattcctcctcttccaggacctcttcccgcatcagggtagtaatccgggtcacggtacagcgctccacaccgccattctccgtccgggtcaccttgaattccagccctctatagccgacagtatctcctttctccgcaggagcttccagcaaattaagaatcaggccccctacggtgtctatttccccgtcctccaaatccatgtccatggcctcccccaattcctcaatgcgtgccagaccggatacgtcacaggagaagcccaccgcatccctaggcaactccgtcagcactttaatgcggcctcggtcccagcccattacttcggaaaaaacatccgtcagggtcaaaagtccggaagtccccccgtgctcatccagaataatggcaaggcgcacattgtccttcctcatgatttccaccacattgtcaaacttcaccgttttgggaaccttgggtatggcatgaatgtattcaggagtcagagcctttctgcggaacatgatacggaacagatcgcgggcatgcaccatgcccaccacatggtccagatcaccgcggtagacagggtaacgcgtacggcgagtgcgacgcacaatttcccgtatctgctcatgttccgccccttctggaatggcgtctatcctgacgcgcggggtcatgacctggtgtacatacagatcatccaggtcaaacaagccgtccatgatgcggccggattcctgcggcaacgccccgttctcatggctctcttcaataatatactggagttcttccgcagaatggtagtgggacttggattcattacggtccacacccagcaaccccagaaagaaattgcccagggcattcatacccactaccagcggatacagacatagctggatcacgtacatgggcatcgcaatgatgaggcaaagctttgcggcgtactgtagggaaagcgccttgggcaccatttccccaagaacaatatgcaggtacgtcagcaccgccacggacaggatgctggctgcgccatgagccaccagccaggaagcccagccgtactgcgccaaccattcatggagccatccggctaccgcatgctctccgtacatacccaaccccagactggcgaacgtgacgccaagctgcgccgtagcaatgtagcggtcctgtaaccggggcgttttcaatatctgggaaacgcggcgcgccaccatgttgccggacacacccatctgctccaatgccgcacgcggagcgccgagcaacgcagattctgcagccacaaacaggccgttcagcacaatcagcaacagaataatgaaaaccgtcatcatgcatccaccccgctttccatggcaaattcattttcctttctctccggaggcagcagcaggatagaggaaacacggttatggtccatcttttccaccacaagcacgcgtccggcgataatcaggcggtccccatccttcggaatgcaggacatgtgcttgatcacgcagccgcccacagtagtggcgccattcatcaaaaagggtaccaggcattccgccttatgggcacgcatcatgccggggatgcgcacggaaccatccggaagggtttccaccttttccccggagcggatgaattcctcatctatatctcccaccatttctcccagcagacgttccagcgtcaccagccccacaaacttaccgtattcatccaaaacaaaggcttccttggccctgtcttcccgcaaacgggccatcagcatctctaccgtctgcatttccatcacgcatggcacctgcctcagcatggaacggagaggaggcagaattcccttttccgcataagcggataccatatctttaatatgcagcatgccaatgacggattcacggttcccttcatacacgggaatatgggtatgaggcctatctgcgatcatattcaaaatatcttcctgtgtggcatccacatccaggcaaacaagctgaaaacggggaatcataatttgttccaccgttcgttccgccagggacaaagcgctgtgcagccgttcatgctcgtcttcctccaacatcccgccctggtggctttcatccagcagcatattaatctcctgctgggagtggatgtgctgatggccgccaggtgggagccggaacagtttaagaagcaacaaaccgcttccattaagaaagtcaatgaaccatgcgaagaaagccagtgtccatcgcatgggataataagtatacaaggccgcctgcttgggaaactgaagagccagggatttgggcatcaattctccaagaattacctgaaaaaccgtcaagcctatcagtacaacaagagcggctgcagaattggccattacggagtccatcccgccaaaccgctcaaacagagggaacagataggcggccagttcaacctgtccgtatgcgcccagaaccagactggaaatggtaatgccgaactggcaagccgcaatgtagcggtccagctcttttgtattttccaaaatcttaagcagatgaacagccaccctgctgccgttctccgccatttcccggatcatgttgcggcgtacgctcactgcggcgaattctgctgcaacataaaaggcgttgaccagaatcagaaaaagaataacgaaagtgacaaaaagaatcatgtatggcaggggtgtccgtaaaacgcaacgggcatccgcatcataggaaccgaaaaaatcctgtcaagaacgggaaacaaaaaaatctgccatgcggaaagagctccattcctcccgtccctttccagcattccaaactttctccttccggcacaggtaaaaaaattccggcgatcacgcaagcagttgaagcaactgcaaaacatctttccagcaaccggaaagccccgttcccggaataaccggaaacggggctgagagtttaaaggctcaacgaaaaacgttattccgtaatgccggcggcttctgcttcggcagccttggcatctcgcaaagcggcacgtatggacattttcacgcgtcccttgtcgtcaataccgatgcacttggcggtcaccacgtctccgacgctcacgacgtcctccgtcttggcggtgcggccttcggccagttcggagatatgaatcaggccatccttgccgggcagcacttccataaacgctccaaaggtggtcgtggaaacaatcttaccggtgtacagttccccgatttcaatggtcttgaacatgcgggtgaccaattccaaagcacggtccaggccttcctgcttggcggcgtaaatatgcacggtgccatcttcctcgatattgatatcggcgccggattcggcctgaatagccttaatattcttgccgccggggccgatcagttcgccaatgcggtcggcgggaattttggtggtctcaatacggggagcattcgggctcatctgggccggagctgcaatggcttcattcatgaccttcagaacatccgtgcggccggctttcgccacgtgaatggcttcctccaatatggagaggggaatgccgggcagcttgaggtccagctggtagcctgtcacgccttccgacgtgccgcagagcttgaagtccatatcaccgtaaaagtcttcggaaccgatgatatccagcagagttttgtaagaggtgatttcatgctggtcattctgttccgtcaccaggcccacggaaataccagctacagggcgcttgaggggcacgccggccgccagcaaagacatcgtgcccgcacagacggaagccatggaggtggaaccgttggattccatgatttcagaagagacgcgaatggcgtacgggaattcctgttcgccaggcacgaccggagcgatggaacgttccgccaaagcgccgtggccgatttcccggcggttctgaccgccgaaacggccggtgtctcccacggagaaaggcgggaaattgtagtgcaggatgaaacgcttttcattcacgctgcccgtgtaattgtccatgtactggcgttcttccatcggagcgagcgtcgccaggcaaagggacatcgtttcaccgcgggcgaacatcgcggaaccgtgcaccacaggaggcagcacattgacttccgcagtcagagggcgcagctgcttgagagcccggccatcggcccgcttgtccttttccatgatggagatgcggaaagcctttttctgaatatattcaaaaacctgttccacatcaaagtcagtagcttccggatggcgttccttgatggcggcctccacttcgtcacgcagggcccccacttttttctgacgctccaccttggaaggggcgtaaatggcttcctcaatacgatcgccggcaatttcatagccgatttccagcaattccggcttggcaaggcaaagttcataagcgcgcttctccttaccgcaaacggcgcggagctcttcctgcttttcgcaaatgaccttcacgttctcctgggcgacacgcaaagcggcgataaaatcttcttccggcagttcattagcggaaccttcaatcatgatgacctgatccttcgtgccggcaaataccagatccagctgactatgttcacgctgggagttggtcggattgataacaaactgtccgtcaatacggcccacacgcacagcccctacgggttcggcaaagggaagatcggaaacgacacaggcggcggaagcgccgttaatgctcaggatgtccggttcgttttcaccatcggcggagagcagaagcgtaattacctgcgtatcgtagaagtagcccttggggaacatcgggcgcaggggacgatccgtcatgcggcacgtcaggatttccttttccgtgggacgcccttcgcgtttgaaatagccgccggggaacatacccgccgcagcggccttttccttgtactccacggacagggggaagaaggtttgcccttccttgactttggtggcgcttaccacggtcacaagaacgacggtatcgccgctgcggacaacaacagcaccgtccgccaaacgggccatcttgccggtttcaatcgtgataggattcgtaccaacgttgcattcaactgaatgtatgctcattatattttttgtctttcaatcacccgcagcctcatcagcccatccaggccggctccgggcgggaagcctgaatggcgtcaggtacgggcagtgcctcaggaagatgttatccgcaacagtcctttcccagaaacagaggggggaatactgtccacgcggcaggacgcgcatcccagatggatcaaacgctccggcccagtcttaccggcttgacagcctgtgaaaatccgaaaatttctcaaggcatgcccgacagaaacgtttcgggaaacgaatccccgaacgtcgaatgagagcataatccctgtcaaggataatgcaagcaaatagtttgataaccatagcagtccatttccttccagggctttaaatatccacccgcatggggagaaaaggtatttttcccatctcaccttcatccattcaatattcttcgcattcctgattgaaatgcattactccaagcaaaatatccggaaacgtccgccttcccttcttcacaggagcggaaatgcagaatttaaggacggactgagtattcctgcctgactcccataacagccgcccactgctttttcatccatattttcctattctttgcgcggctgcatcatacccgcaataccggactttccgtccccagcaaacatttacgcaggaataaaggggcagtcataccaacaaaaacaatctccacactccagaatatcttctttcacaaaaagacaggcctttcaaactctcctgaccaaaacacaaatccacagtcacccgccatgccccccttccatgacaacgctaccacgccagcccctcccataaaaacaacggccgctgcggaaaaccgcaacggccgaatcaaacgggaatatgctccgccttttagcggcgaaggccaagacgctggatcagactctggtactgggccagatcttcacgcttgacgtaatcaagaagcttgcggcgcagagccaccatcttcaacaacccgcggcgggaagaaacatcatgtttattcgtgctcaggtgttcggtcaggtgggcgatgcgctgggtcaggcgggcaatctggtagctggaactaccggaatccttttcatgcatcttgaattcctgcaaattgatttcgttactcataagtgttttccttgaatgtatttagctcgtggcagcggctaatcgacactgtgagggcgccaactatgcatcatccagccccaaaagcaattcaaatttcgtcatcccggggaatttgccttcggtccctgggaaagcggcccctctccattttccccggtgtcccagacttcgcggtccttttccgtcacgaggcgaaccacacggcagggattacccacggccactacattggcggggatgtccttcgtcaccacgctgcccgcgcctatcacggaatttctcccaatacgcacgcccggggcaatcaccgcatgaccgcctatccatactccatcctcaatggtaatgggcagagcaaattccagcccctgccgtctcagccccgggtctacgggatgcccggcagtataaatgcccacgttgggacctatcagcacgtcattgccgatggtaacggcagcgcagtccagcaccacgaggttgaaattgacatacacgcggtcccccagccgtatattggagccgtaatcacaacgcagcggaggttccagataacacccctctcccatttggccgaaaagctcccgggccaattcccggcgcaggctttcattttccggagcggactggttataacggaaaacaagccggcgcgccctgagccgggcggcagccaattcaaaatcctgggcatgatataaacgcccggacagcatgttattccagtccttcgaggccattggatgaagagggggtcacagcgtccgcctcagaaaaaggcagctgcccgtttttctgttctccaacagacggcatggcggcggcatctttttttacggacgtttccgattttacaagttccttctttccagaggaagctgaatttgcgccagccaccggggcagcaggcttgtgcaccgtccggaacattccggacggcttttgttgaagctcgtgaatattccagtttccatccctgacaaccacacgggttcctacgggagctatttcaaaaagatttttcgcaatcaagtggggaacacggatacatccatgggaggatggatgaccgggcaagtacccttcatgaattcctacagccccgttcactctcatgaaatagggcatcttggcaggttcaaacctctcgccgggacggggggaatcccttcgtatatccccatcccgcaattctccgtcagcgttaataaacgcaccgtaataggaatgatggtcttcctccttggaagcaatgaggaagtagccggagggcgtcatgccggaacttcttccggaactgatgggggcatacgcaatgcggtgcgacccccggtagatatacatcatctgctttttcttatccactacgaccagcagctttccgggcagcgacggatcatcttcccacttgagcaggtgccccggaatagttcccgtttcttcaaaataccccgtcatttcttctaccggaatatgggaagaggggacaggggaaagctcccttcccgtggtaccgcaggacgaaaacaaaaacggaacacacaggcaggaaaccaacggatggaaaagggataatttcatctcaataagtcgcatcactgcgttagacagctggaggccggaaaaaagaaccgctttttgacaaaactgtcaactatcaatcaaaaaaatctcttttcctttactcctgccctccgttaccacatccgggcgcgcctgccgcgctcccggccgttcccggttccgtggagcaggccatgggaccaagcctccgcaaaggttcgtgcggcatccgccgtatgggaatgcccgtcatgcacggggctttccgcaatggctccgcctacgccgggaggcctggacctgtacaactccagatgctccacgcctcccggctcctcttccccacagaagcctcgcgccttttcctgggtgcgggcatggaaaaaactgcgctccagcaattccctcagcgtattaatgccacgccagacatccgtggttctggggacgacgcgcacattcaccaatcccagcctccccatattctccacataagaaatgccgtgcgcatccctccgtgcagcatcatgaggcaaaagatggaatgttaccgccacaccatgatttttctcccagtccttcattttttcaacgtaatgggccaggggctgctggctggcggcataatggtccagccagtggaaactgtctcccatgatctgcacaagccaaatggccgtatggtcactcagccccagatcccatgccgtgaaagtgggagcgtccggatcagcctcaaactccacccctacccgcccccgctcccgcagggccatgatacggctgccgtaaatactgccttcttcccctgtagcaaaagcctcctgcggcgttcccggatactcctgcttcatggaggcgcccatcacccgggccatccgggcataccatctcttctgccccgcatccagaaccactccggtctcccgttccagagaaaggaaatactcatccagttccctgctccatctgccgcgccccggcaaagtgtactcatcctggtcaaaccagctgaaaaaaaagaatctgaaatccaagggggaaagctcgcttttgcccatgttttccatggcctggcgcgtcagttcataattcactccgtaccgtccgccctcatgagtgctttccttcagaataaaacctccggggggaactgtattgattgcccccgtacggatttccctggctctccacggagcatgcacggaaacatacgccagctcggaaacatggagaaactgcatggttccccctcgcagattagtccccacccgcacatcgctcccattggagaaagccaggcggctgcgcgccaacgtacggggttgccattccccctttttttccacgccggacaggctcttgattctctctcccagccgggccagggccacatccatcgcagaggggttgggcggcacgtaatccagatgatcccaggcaaaatgcagcttggccagtttctgctgggcgtccggtaggcttttatcaatgattccgcaatggaaattggaccggaacaggctcatatccagcatcagcatggccacatacgtagaaatgcccaactggcgcgccttcaggatgtcattcctgtaccacagccgctcatgcagccgccgctgcgccctgttcagggaaaaacgctggagctgaccggctttattttctatccagtacaggtgttccagcctccaaagctggctggacaggacggactgccacggcaggctccatgattccgtcaaatgattagaattttccatactcctctattaattttttcaacagggctccttccctggtcatccccttctgggcctccgtccccttgtccaggggaaggcggtatgccagtggatcgttcagcacgtgggaaacgaaccggagtgcctgcaccatcacgggatcaagcagatcaagttttcctttcaaataactctcacgcacgcccagttcttcatacatcctgattacatcctccatgaagcatcccacagcctgccttctgttccaccaccatcgttcctgagcatccgcatcccccagcgtttccaaaatccgacccaggaaccgggtacggctcgcccgtgaatcttccggggaaggttcctctccggctcccgtaaaacactccagcggaatataggaatcccgttcggacaccgcaggcgctccccggctgtccagataaacgccgttccatgcatgtaccacgtagggcgcgcgtgcctgccgtacgggactttccggaatgcccggcatcaggcgcacggtatgccccgggtcgtccggatcacggtaaatcacgcagttggcatacatcgcgcgcgcttcctccggctcaggaagaaagggaagcatgccgcctctcagttcctcctgcctgcggtccagaacaccaatcagggaaatggcctcatccaacgggagttcccggttccaggcagacgtcacccccccgggagccgctccggaatcaatccggtaaatcttccctttccaactaaccccggattccgtagcttccggtcggcctgcaaaatcccgcctcaccgcatccagcgtctccacagcccggaccacatccggacggctacgccaggcggcaggggcgggaacgccacgcctgacggaaaaatcttcttccacatacaggggcgcttccagaatgggttccggaagatgttctcccaaagcctccagggaaacatccttcgcgcgcagaggtcccaatccggtccggaacggctttttcaccaaatgcaggtacaggccgggatgttccggatccggacgccaggaattcagctgggggaactcctgaagcgcccgggacagttccctcatgcggctttccgccagccgctccatcctgcgtacggaaccgcccgcgtatccgtccagcgcggacagggaacgcaccagtccctctttcacgtgatccggaacggtaaacaacagccgtccggacatcaggctgtgagagtaccgctccaccatggggaggcgaacctcccctccggccggagcccaggcgcgctccgcccgtatgcgttcattcataccaaccgtctctcggagcattcccataaactcggcagtgtccgcatcctccctcagcgttttcttcagcaatccggcccggcgcaccaattcctcaagaggttccggaaccctgtcaggcattgcggccccgtaacgcgcccaggaagccaccgtttccggtacggtgtcatgatccagatgggcaaaaaaatactccttggacagctgggacaactcttcaatcagttccgtttcccctgggagcttcctgcggcgcggcacacgttccaaatgtttcaacatctcccaagcgccttccggggaaagctgatccgtgcgcatcagccggtcccatacgacttccgccttgtcttcgatcaaagccaggggattggccgtattatgaagcctcagccggtgcattaccaaccccttggctgaggaaacgggcaaattatccgcatccacgcccagcctctgtacggaacccacatacttttcgtgaatattcatgcgctccaacagggcatcacggctcatcagcgtttcagcggcaaggcgcccccggcccgtcacctccagacgatccccggaccccaccgctccgcgcacgccgtaaccagctttcagcatatccgccaccgccatggccgtcaggctgtcatacagacaggggagccgccccccctgcacgttttccaacccggtggtcagcctcagataattggtatcccattccggccgcccgttgcgggcatgccattcccagctacggatcaaatccctcttagccgagcaggcggcagaaaacatcatggaaacattggccatcaggtccgcttccgccgcctcccgagaaggatgccagtccgaccaccttccgttgggatactttactctccacagcctttccgcaccttcccctccgggtgaggactggaacaggcgcggggtcagcaggagaaggctctccaccgctttccgcgtccccggataaatacgcggcgaaacctgttccggaccggcatgcagccgcggagcatccagcacagaggcataacgggccacgttctccggcgccacctccagaaaccgggccagcaaccgcccgtaactctccacgggcgtatagccgcgccccacatgcacgtcaaattccttcatgttgggaagtacgtggtacaggctgttcacatccgcctgggttccccataccatgcggttcatctcccgcagctcagggcttaccccatggcgttcctctccgccaagagaagccatcatgccgctcatcctggccagggcggagggaaggccgtccggattaaaagattcagacaacaaatccggagcattcagcaacgcactcccttcctccagccaccggtgcgccctgctgcaggcgccttcatcccggcaaaacgacttccataaacgaaaagccacatgcccggccgcctcttcatgcggcacgccgtgcacccgttccattactccttcataaacattggctcgtgtccgcaaatccatatccaccgtaacggcgtcccagtccctgccggaaaaacccgcacggcgccccgcctcttccggataagccagcagcaacatcctgtacggccgataggagcgcttcttcagcctgtccgccacaaacgctcggcgcaaagcatccgcatgaatatcatattcctccgcattccttaaacgccatgggatttcccgtccgttcctgttccggaccagccccaaatcttcctcttccatacggcccagagtctcataccaggaagaaagagcctcctctacggaaggccggccctgcgttcgcttcatctccacaccgggagccggttccgccgcataaacaagctgcccgtccgctgcggcggcttcacccacgcggggcagaccggcacgcaacagccacttggttctggccgtaacataatccggatgaggaaaaagctttttcaacaccgcttccgattcggggaaatcccgcatcttccaaggctttgtacgtacaggagaaggcaaatccaaaaaatctctcacatcctgttccgttttcaaaaaaggctctccggcttcatccagggcgcgagaccactccaaagccttcctggaaatgtacaaagacccccacagcggagaattacgcagggacttctgcaacaattccccggcacggtttacatccttctcctgcaaaatccgggaaaccgtttcatccggaatgccgaatactttcagaggggaaccgtctccaagcagcattccggcatggcggaaatggttcagagcgacctttcccgcgcctatcagcaggaaaggcatcatcatgacggcctccctcaactggtcatccgcggaagcctgtctggccttccatccctcccagtccacgccggacgccttattcgtaagagctcccacgccttcctgaacgaccatgggcgtcaactccatcaatttattttccgcctccatcttcacggcatccgccgcaacggctcccattccggaaaaaaacgcaccaggattccctgatgcgggcctcgtggcccggaacgcccgcattccctgccccagcatcttctggcccagtttcgtcattccgaaagaaagcaaggtattcaccccgccggagacgacagctccccccatctgagcatcaaacacgccgtccgggttcatgctccgggcctccgccatatggcgccccgtctcccccgccatcaacatgccaagcccggcagggccgcaaaacgccaaagccgtggacgctccctgctgggccatgtccaccagcatctcccggaaccagggggaatcctttcccccacgcagcggggcaaactccatcctggcaaaattcctcagttcttcaaaactccgggaataattgtccagcgcctccttttcccgtccctccggcaggagccatgctgcgccgtttacggccagctgggccgcattctccgcaacctctgccgcaccgcgtttaagcgccccccccagggcatcccgaaaggcgggacgggaacgcaaatagggagccatcatgcggaacaccttctgacggtctccatcccccagggaagccaggcaatccacggcgcgtatgacgtccggaactccggcaacggctttccggttcagctgtatggcgggaaaaccttccttcaccggctcctcactggctaccagcccctccaatcccttgtggatgatcccggcggcatccgccagacggttcctgtcatccagagcatcggatacggccctgcccttcaattgttgcgccacagcctgcaaatcttccggccatgcggaaatggcttcccttccccgttcgtcaggaaccgttccgccaccggacagagtacgttcatactcttcctggtataattcaaacaaagcctccctccgggaaaggcgtacctgattgtgcatggaaactgccacgaacaattcgtcatcagacttgccggacgctccatactgccgcgccacctgttcccggatactcttccagtccctccggatacgttcccggggaatcgccccagaatccgccacccaggactgcatgacgcacgcggcaattctttcccgatccgccgtcccttccggatacatcgcctccgctttcagcctcacttcccgcggaatggtcatcacatcccccgtcaatacgctattccaatattcttccctttccgactcccgttccgggaatttttccgtgccggaaggtacggagaatgctgcgttccctttccgaatatggctttcccccacagttccgggaaccgcttccggaaaactcccttccagcgggagcgcccctgtctgttccctggttccattatcttccatcatcactttccttcttttccgttattcatatctgaaaaccccacccagccggcatcctggaagcgtttctctttctcaaaaaccttttccatctcctcagccggctgctccggggccctcttcaccgcctctgccaattccgtctggacacgcttccattcctctgccgcacgggcatcctcaggcggcccccatgcgccattccggaacatggcggacaggcgacgggaagcagcgcggcgcaattcgcggggtatgcccaacatcacctcgcgccgccggagaagcctttccacctgaacggcaggcaaacctgaagtggccacttctatcagggcgtcagcatcttcctcccctccgcaatcctcatcaatcagcgaggtcatgcggcacaacagcatatcgtcctccggaatgctgataccggaaaatcccgccgtctgcctccggtcacgggaagccgtataacgccttagctgctcggaactgatcaagccatgcttttcagcattcgccaatccgtcatcccgcagcaacccgccgccggacacggtggccgccagagcatccgcataacgccgcttcaactccccatacgctgccgcagcctcttccgccaccttcttttcctccggagtttccggcatcttctcctgccgggaaacgatgcttacagcggccgccggatcacggcggacctcctccaccgcccggttcagcgccgcgcgggaatgcgcttcctccgccatgcgggaagcctcctctcccgttacaaatattccgctgccctccttaatcctgcgttcggccagagcggcctctccctgctccacggcagactccacccccccggcccaataccggcgcgcctcctccaactgccccagacgggacatcttctgcaaataaatgctcccggcagtttccagattctctctcgccatggccacgcgctccctcaccgggccggacatacgggcaggcagataggaaggaagccgttctgacagcgccttcttccatctctcctgaaggtgttccgaatcccctccggcttccagctcccgcatcacgtcctgttcaaaacggtacatcccgtcacgggcctgcgcccattggccggcatcccgcacctcctgcatttccttcagcgcggctcccgccactccggacacagccatcacgccccccgccagatcccgcacaccggcggcctgtgcttcaaaagcattcaacggaatcacgccggacaaatccggagccacatgcaacattccaaaatcctgtattcgtatagccatctttaacggcttccaagctaaagagcggatggaacgcacggcatccattccaaaccgtcaccgtccggcacttgccgcttgccaaaaccgggccgttccaacacaatcacccctatgacccgcattcgtttcaccgccgcatatgacggacgcccttatctgggctggcaaagccagccgggaggccgtaccgtccaggacgtgctggaacgagccttttccggactctttggaaccccctgccgtatccacggttccggcaggacagacgccggcgttcatgctctgggccaggtttttcatgcagacgctccggatacccaccgcattcctgcggacaaatggcctgccgcgctcaacacgcgcctgccccgaaccatccggattacccatgcggaatacgttccgcccggtttccatgcccggttcagcgccacgggaaaaacctaccgttactgcatttcacgcgcacccatcctcaacccttttgacgccgggctggcctggcaccgcccgctggcatggagcgtggatattctggaacaggcggtacacctgttccggggaacgcatgacttcactgcttttgccgccctgcgcggcaatgaaccgcgccctatcccggagggttacttccgccgaaccatcacgcagacacaagtggcacaggcaggggaacatgtcttcatcacctttaccggaacgggcttcctctacaaaatggtgcgcctcatgacgggagccgcccatgaagccgcacgtggaaaaataacgctggaagaactggctcgcctcatcaacgctccgctcccggatgacaaaagcccgttttgcgccccgccggacggactcacgctgatgagggtccattacccggaagaaacgttcggagacaaaaagaaaataaactgaaaacagccgtccttctagacgcgtgccgtaccgtacagcccttccctcctgatcagcgcctccactttccggttcagatggggaaccggacatacgcccgaacgcaaatcatgccgtatgcgggtggaagaagcgggttcatccccttctatgaaaagggcgcgcacccctttcctgggtgatggaaccccgccgcggcggtaaacaatgaacgtcaccaggctggacaaatattcccagcgtccccactgttccagagaatcccactgatccttgcccatcagccagaacaattctgcaccgggataacgctccgccgtcctctcagccaccctccacgaccacgaaggaggcggaagttccaaatccgtccggtcaagcatggcccaatccagcccttgaacagccaactcaatcatccggcagcgctggtcatccgtcacggagggggcctgctccttcagcggagacagggaacacggcataaacagcacgcggtccattccgcaatatttccgagcatgctcggccatgcaaacgtgcccctcatgcacgggatcaaacgaaccgccgaaaatacacagcttcaccgtcatccaccagaagtcagagtccttccgttcccttgtaaggcagaaacccgccgatgggaacgcgcaccatccttttctccagaggcaggcggcggaagcgggtaataaaatccgtcagacggccgtaattgcgctccgtcttgggaatcccctgatggccgcaattcacatccggattataatgcagctccacatgaagatgggccggatacatgccgcggttcgtgccgatagtgcccacctgggtgccgcgcagcaccaactgccccagcacaacgttaatatcgttcaaatgggaataaagcgtctggcagcaaagaacctttccggacttgggttcgcggaaagcatggcgcacaatcaccacctttccccacgcgccccgggcgtccgccgcataagttaccaccccgtggcctacggaataaacgggatcgcccaaatcggaattgcctcctttattgccgttccaatcctcacccatgtgacgggggcttttcagacgcaggccgcgggaccggtaatagccgttgccgtcaggcttccctaccggaaaatcaaaaccgtcacaaagaggaacaagcgcaaacttgctgtcccgccgggccatgtaaacgggagcgctctcgctgatcaacgcggaaccggtcagaaaaaccagcgccagcagtaaaaaacggaaataggacatgggaacgaaagtcctttgtatgctaaacggctccctactccgtatcaagcggaattccccgcatgtcggagttagaattcactaacacgctcccccatgttttccacttcctttcaacttgacagcaaagcctccgtatgaaagaagggaggagcgactcccgtatttttcaacacacttttttccgcatgaacaaactaaccacactcttcctcggaacggttctctcttcctccatgctgcccggctggaccgcagcaccacccaaaccatacggcgcgattccaacacccgcccaaatcaactggcagcgcatggaattctacggcttcatccactttggcctgaatacgttcacaggacgggagtggggttacggcgatgaagacccgaaaattttcaaccccacggatttcaatgcctccgatatcgtctccacctttaaaaaaggcggaatgaaaggaatgatttacacggccaaacatcatgacggcttctgcgcctggcccaccaaatccacggaccacaacatcaccaagagcccttggaaaaacggaaaaggagatgtagtccgggaattcgcccttgcctgcaaaaagcacggcatcaaattcggcacctacctcagcccctgggaccgcaacaacgcggattacggcaaggatggctacctggacgtttactataaacaaatccgggaactgctgaccaattacgggcctgtctttgaaatctggtttgacggagccaacggaggagacggctattacggaggagccagggaaaagcgcaatatcggtgacgcggaaaaatactacaactttgaaaaaatcgtggaaatgatccgcaaaatccagcccagctgcatcatctggggagcgggccactacggagacgcccgctggggaggctccgaaaaaggccacgtcaattatccccattggagcactgtagggctgaacggcgggggcggaggcaccggcaaacgcggcggagaacgctgggtgcctgcggaaggagacaccaccatcaaccatgccggctggttctggcaccagggacaggcatcccgcgtcaaatcccctgaagaacttatgcaggtatggtttgattccgtaggccgcggggccaacctcattctgaacgtggcggcggacaaaacgggcagactggatcctgcggatgtcaaatccctgctggaattcaaagaactgcgcgacaagctatatgccagggactacgcgttgggagcaaccgtcacagccagccagacgcgcggcaacgacaaaaaattctcgccctccaacatgacggacggcaacattgaaacctactgggccgtggaagatgacaacctgacccccaccgccgttattacgctgcccaaacccgccactttcgacgtcatccggctgcgcgaacaaacacgtctgggacaacgcgtggactccttcaatattgacgctttcgtcaatggcaaatgggtttgtatcgacaatgaagggaaaaccatcggcaaccaggtcatgcgccgcctgaaccgccccatcactacccagaaactgcgcctgcgcatcacgggcagccaggccactccctgcatctcggaattctccctcttccgccagcctgcgggcgccgtgcggccctccatcttccgccgcggagacaacctcgtcatcattgcggacggcaaaaataaaatcctgtacacgacggacggcagcgaacccaaggcaggatctcccgtttacagccagggtgctaaatttacggaaagcggcattgtcaaggctcgctgccaattctccaatggtaaattgggccctgtcagccaggccaaattcggcatcagcaaaaccggatggaaagtgaaaaccgccacatccgggaatgcggcggcggccatagacgacaatccggaaacctcatggcttgccaaggcggaagcgcctcaatcctttgtggtggatatgggaaaaccgtaccaggtttccagcttctcctacctgcccagacaggatggaaaaacctccggcatgacggataaataccaatttgaagtaagcgcggatgggaaaaactggacgaaagtggcggaaggggaattctccaacctgcgcgccaaccccattgagcaatccgttaatctcaaaaacatgaacggacctgtgcgttacttccgcttcatcggcaccagttctctggacggcaacagcgcttccgctgcggaaataaacgttttcggcactcccgcaggcaaataaaaacttccctgacttttctcaccagggcattccggttttttacggccggaatgccttttttgcggcatgaacccatttgcaaaacaggctccggcagacaaaccggcatcaaggaaaacgggaaaggacaggccagaattccgtccaactccccctgcagcgcttcaataggctgggaatgtcccgtatatcgccgcaacggccaaaagtccaaagggacggctcctgcatggctgcctttttcagccaccgccggtatgcggaacatattgaaatcggaaaaagccctgcaaccccatgccaacggcagaaccccgagaaaaacgcctgccgactgaaatcagccacgatatcatctccggaaggcttctgttccatttcctgtttgtacgaacaatcttctccctgccgtcggaaaacctggcgcttttccttacatcgtaaaatctattttaagcaaacaacgggaaggcacggtcaactcagcgagggatttccgcaaaacagaagctttccttttcaaaaatcaggtatgaaaaagggcgcatccttttggatgcgccctgtgcaaatcatgccggcggcgaatttactcctggccgctgaaatcaggcgtgaggatcaggaactggtcgctgatgtccttgccccttctcttgggaatgaaggtatcctgaaggttgtcgttgtcgtccagttccagggtcttggcactctgggcagtcgtgaaaatcagaaccttgccgcggaagctttccgggtcaaaacgcacggcattgccagccacaacggtgctgccgtcttcaccaggaagcacggaagtgaccatcaggggatattcccccacggaacttccaatacccactttcttgttattgtcacccttgcgcatgacgtaggaaatacccacttcaccgggggtcagggcctgaccgtcgtaaatttcaccgttgggagtaacagtggaaccgccggaaggagtctgaaccttggcgtagaagttgctttcggaaacagactcattgcccagaagctgacggaaatagtcattggaagtatcgccctgaagtgcgcccaggccgctcatataattatgctgggcaacaacgcggtcggcagtgatgtcatcggggaaattgcccagtttgctgttggatttgaactcgttcatcgccacgcccacgttcttcatgttggtcagggcctgcatctggtcgcctttgttgatctggttcaggataggaccatatgccacggaagccagcagggcgataatggcaatgacaaccaagagttcaatcagggtaaaccccctgcgtaactggtgtgttgcaaaagatactttcattgttggatatgatggaatgtttacagtttaagaaaaccgtacgtggttatctatgttcgtttctactattaacgcgatttcccagtcaggacaagcatattctcataaaaatcttggttctgcaaggagtgaaaactctgccgcagcccccctgcaaaaggcccggaaaataccgggccatgggggaaaatcctacctgccgctgccgaaaaaggaactcaacccttccaaagctccggcggacggcctgtcctcctcggcaatcacctgccgctggagttccgcgatctcttccagccccttgcggcctaattccagcatccggcacatctgatccgccgtgaacacggcctcttcaccggccccctgcacctccacaaactctccctggtcggtcatcaccagattcatatccacttccgcatccttatcctccacatagcagagatccagcagagcctctccctccagtattcccacggatacggcggaaaccagcctcttcatgggagactccgccagctttccttcctcgacaagcttgttcacggcaatggccagagctacggaagccccggtaatggaagcggtgcgggtaccgccatcagcctgtaaaacgtcgcaatccacccaaatcgtgcgctggccgatcttgcccagatccacggccgccctcagggaacggccgatcagacgctggatctcgctggaacgtccgtccagtttccccgccgtaatatcccggcgtttacggtcaagcgtggaatagggaagcatggaatactccgccgtcagccatcctccctccacacgctgaaccttcatccagcggggtacatcctcctcaatcgtaacggcgcaaatcaccttggtgcgtccgaaagtcaccagcacggaagccgtggcattcggggcgatacccgtttcaaagctgatcggacgcaactggtgcacaagtcgtttatcctgacgttccatgcggggaatcatgacggatgccgtcatctttttcaaatggaaagatggaattcccgttccaaaccgctaatatccctcccatgaaacaccctcgcacccgtgtggccgtcattgacgtggtggccctttcccgccagatgatggaacacatgccgcggctctccgcctgggcggaggggcggagcgtttcctccttccccccggcctttccggccctcacctgctctgcccagagcacctacgtgacagggctttccccgcgggagcacgccattcccggcaacggatggtacaaccggaacatgtgtgaaatccaattctggaagcagtccaacaagctggtgcagggcccgcgcctctgggagaaactgagggaacggtacggttccggcttcacctgcgccaaacttttctggtggtacaacatgtattccacggcggactggaccatcacgccgcgccccatgtacccggcagacggccgcaagatcttcgacatttacacccaacccatggaactccgggaaaccattaaaaaggatctgggagaattccccttccccaccttctggggccccatggcagggattcagtcctcccaatggatagcagactccgcccggtgggtggaacggaaacatcgccctgacctcagcctcatctatctgccctatctggactatgaccttcagaaattcggaccatcctcaacccaggctgcccatgcggcagaggctatggacggtcttctctgcgacttgatcgactttctggaacgggaaggcgtcacccccgtcgtcctcagtgaatacggtatttccgacgtatcccgcagcattgccctcaaccgcctcttccgggaacggggctggatcaccgtcaaaccggaaatgggtacggaaatgctggactgcggcgcctcccgcgcctttgccgtggcggactaccagactgcccatatctacatcaatgatccttccgtaaaagaagaagtgaaagcactgctctccgccacacccggagtggaagaaatcagggaaacggacttctccggcctttcttccgcggctctggaacgcctgccggaattcaccgccgtcgcagccccggatgcatggttcacctactattactggctggatgacaccaaggcgccggacttcgcccgctgcgtggacatccaccgtaaacccggctatgaccctgcggaaatgttctttgatccgggccttaccctccccatgttccatgccgccgcctttctgctgaaaaaaaagctggggttccgcaccctgatgaaagttatccccctcaatggcgaccaggtgaaaggctcccatggcagagaccgggtgcctgcaaaccagcagcccgtattcatcggcccggccttcctgccggaaatccatgctgctgaggatgtccatcaagccatcctctccgtctttgaaaaagaataatagcggttcccctcagcgggcatccggacgggggtcatattccaggccgggaacctcccggtaatgaatgccgtcccacaggacgggaatgcagcagaaaaaccagcttctctggccgtcgtctcccttccagtgcccgaacacgctgcggatcaatacacggttcacccccttgcggagcttgatctttacaggagggcggaaaaaatacccttcccaggtcagaggagcttcttcaatgcgcccctttccccaccccgtccagggcaggctcttgaaaggccacctgggagggttcacgcgccttccgttcaaccatacgtccccgccggaaaaatcccagcttccctgttcaggggcgcgtgcgctgcggtacccgcctgaatgcccccacatgccgttcaggccaaacatcagccacacctcctgctccctggggctgcggatgaaagtcaaagcatagcaggttccatcctcctttccaacctcccttgacatcagcgtgggccagtgatccgtccggtactggttccggtgcatgttgaacatcgcaaaaagatgcctgacatgtacggcggcgccgtaaacaggagtcttcttccaggccagtatcctgtccccgtccctgtaggaaggggctattcttctttccggttcaaaagaggtatcattattcccccggtggtcgaatggccccaccaggctccaggcaacatccgcctgtttcacataggcaaaaggaacgccttggaaaaaatgatcacgatggaaagccaaacgctgttcaaactcccgaaattccttccagccgtccgttcccctggggggaagatgggccatataatccctcctcttggtagcgcttccgcgccagacacgctctgcaaacgtcaatgcacaaggataaaacggatactgttccagcacccgcctctcactgctcaggtttccgtcgcaccacacgggcatgatggcccccaacgccttatcatccccttgaggcacctcgcagggctgctggaaaaacacctggtacacgccggactgggaatccgcccagtcaatgtaaaaaccattgctgtcgatgcgcttcatattcttatccatcctggcgccggcctcgttctctccccagcacatcaatacggaatccttatcgtgcgggccgcccggagaccacacgaccacctccttgcccttcctgcggatatgctccgccatacgtgggataaaatccttcatggaaatgtgcgcctcgtcggatcccatgtggaaaaacctcccgggaaacagggaaacggcctcgtccacgacatccttcaatatggaaacacccttctccgtctgcatgccggtcttcatggccctggcaaaagactggctgtgtcccggcatgtcaatctccggaatcacctggatattcagccgggcgcaataatccgtcagatccttcaattgagcctgtgtataaaaccgccccgggagccgggacttccaatgaaaagccccatccgtcagggccggatacttcttcacttccagcctccatgcgggatcatccgtcaaatgaagatgcagcgtattaatcttatagcgggaaagacggcgcatcacctccttgatcaaggcaggagacatgtaataacgccccacatccagcataattccccgcaggacgaaagcgggtttgtcactaatacgcacaacaggcatggcaaattccccttctctattgaaaaccagttgccgcagcgtttgaagagcgttaaaaaaaccgccaaaacttcctgccctgacggttgcttttcccaatccgacggacaggtcatacccctctcctttcatcctggcgtccggaaacaattcccatgtcatggcaccttcagcagcccccccactattcagggaaccctgaatgccggaagtcctgaatatgtccttgatctccttcatcaaatcatccctgccaggaacatccgaaccaaccttcacctgaacgctcctgaaacctgcctcgcccgcgcccctgacgactttggaaggatatggaataagcgcgggggaagaaaactccggcacaggcgcggtaaccacccctccggccagcggcccccatgaaaaataaatcagcaaggcaataaaaaaccgtacgggaatgctgaacactctgaacaaaagcattccttaactacggcattccatctccgctcctgtcaaaacagggctttctcaactgggaaaccaaatgcttttcccatcctctccaacaccgacatgcttattcctccatatcgctgtttccctccgcaaatccggcaataacgaacgggcgtcttcgctatcgtcccgttcattcgccagacagactcatccagtcagtgcaaacgttccagcaggacgtccatgtccatgtaatcctgcccgtgaatcaattcgccgagaatgggcgcatcggaaaactcctccaccatgctcctgttcgtcacgcaggcagtatcccattcatctttcacattattgaacacgatgcccaggcattccaggccgcgttccttgattgcattcagcgttaacagggcatggttgatggctcccagcttgttgccgatcaccagaagaacaggcagcttgaaatccgcagccatatcgctgaaattccttccagggccaatcgggacttcccatcctcccaccccttccaccaccacgcactcatgtgcggcagacaaagcgtcataagcccgcaggataaccttttcatccactttcgtattctccagccgtgcggccacataaggacacgtggcattcctcaaaaaaacgggattcagttcatccagcgtcagatccttcggcccggcttcgcgcaaaaggcgggcatcctgcctgtctccgcaggccacgggtttgaacccggcggcattgatgcccgcttctcttagagatttgacgatcaggcagctcacataagttttaccgacttccgtatcggtaccggtaacaatgaaattcctcataacggtaaatatttagggatgggatcttctaatctcctcaagctgcccgcgggaaggcacgccgtcattcgtggtcacccagtgattgatgaaagaccagataatcacggccagcaccagacagaacaacttggcaggccaattaagcaatagcagttttttcattggaagaagaaatattcagcagctcttcaaggcgtcccttcaactgttccggagtcaggttgcgttccagcttcccgcctacggccaacgcgatagcccccgtctcctcggacaccaccaccaccacgcagtcgctctcctcggacatgcccacgcccgcgcggtggcgcagccccagggtacggtcgctcatttccttctgggaaacagggaacacgcaggcagccgcagaaatgcggtcgccggaaatcaccacgcccccatcgtggagagccgtcttggtatggaaaatcgtcagggccagttccggagaaaaaatggcgtccagcttcacgccggaatcctcaataggcttcatgctgatgctcctctcaaaagcgaacagggcgccgaaccgctggttggaaagcttgcttaccgccttgcagaaattatccaggaaatccacccgctgaagcttggcgaaggaagaaaaaaacgggtggcttcccagctttgccagccccacgcgcagctccggctggaaaatcaccaccagagccagcgccaggccgggggcgaaaatgcgcgtcagtatccacgaaataacattcagctgaaagaaaaaggccagcaccaccagggccagaaagcaggcgaacagccccaccatgatgcgcgcgccgcgcgttgcgtggaaagcacggtaaatctggtacaggaacacccacaggatgaaaatttcaacaaccgcccggagcgcatccttgatcacaatccagtcccacatgcccaacaggctacacaacaacccggccgaatgcaataccgatcctctcgcgttgccggcaggctccgggaatttaccgtttatctcagttcccgaatttgaagacatctctgtacgttccggagacagatagaagttcttaaaaagaagagcagttctttggaaaataaataataacaataaataaaaattggattaaataaacaatgttaatccgcataaagcaaggcttcagaaaactgaaattctctctggatttacggcatgaacttgcggcggatacactgaaaaaccaaacaaaaaataatcaccagatgatagcaatcgaacaattaaaagaagtagggaaaatctggctcgcctgggtaaggcttcaggatcatgatcatgccgaagtcacgcaaatatttgaaaaacttaaaggagaactggatgtaaaattaggaagaggctggcaaaaatatgacccggtaataaaaaaaggaaggccccaatcctataaaaaactctttcaagaattggatagtgacagtcaggaatccgcaaatgcattgatcaaatatttcaatgagggaataccggaagacgctcctgtctcgccagtcatacacctcattctcatcttatgcgtctgtgaagtaggacgtggatatggccaggcgccggacaatatgctggcttatgcacatgatctcattgattatcccaatctcacatggagctcactgctggacacagcgggaagttccccggagttcgcatttctatgcaagggtgattccgatgaagactataaggaataatgcatgagcaccgtccgcaaccgactctccggtgagcctcccgcacggcatgggttccctgtatccgggcacagggaacttcacccccatcgtcggcaaaagggacagccgcaggcgggctcgagcaattcagaaacataggcggcccttcctgccttccatctgtctcaatcctgcggacatcaaaagttggtgcatcaacttttctcatcacctcaatttccgggccaaaaacctggccgccgtcatgataacggacacctcccttttccggaaaccgaactgccatcaacaggaaaccttccggaaacgctggattaccgccgcatggggcagatgccccagagcggcaccaggccgtcctgcatctgacggcgggcatcaaataaaacgcaggcggcccctgcgcccggcagcctcagacggcctgcccgtccataatcgtaataatgcggtcccctctccgtgccagatgttcgtcatgcgtcacaatcaccagcgttttgcgggactcgtccgccaggccgaacaaaaggtccagcacctccgcgccgttcttccggtccaggttcccggtaggttcatccgcaaaaataatgggggcgtcgttcgccagggcacgggcgattgccacgcgctgctgttccccgccgctcagttcgctgggcaggtggttcaggcggtgggacaaacccacgcgctccatcagttccctcacatattccacgcgcggcctcctgccgatggaggaagccagacaggcgttttccagcgccgtcaattccggcatcaacagataattctggaaaataaaccccatgctccggttccggaacaccgaccgggccgtggcggacaaggcgtaaatatccgtgccgtcaatcgtgacctttccctcttgcggcgtttccaagccggccagcgtgtacatcagcgtggtctttccggccccgctgggcccgcacaggaacaccttctctccggcggcaatgtgcaaatccaccccatgcaggatctcaatggacttcttgccgatggaatagctgcggtggaggttggaggcggtaatcacgggcgcagtataagaaaatccttgccgtattaaagttctatgttgtctataagacgcacgtcgccgaaatagacggcggcggccatcagggccggcttccggttctccgccagcggctgcatggtctccgcatccacaatctccagataatcgatgcgcgtgccgggcacaccctcaatcatggcggcggcatgctccttcaccttggaggcgtccgccccggcctggaactcgtcccgggcctgaagcatagcctgccgtattaccacggcctgttccttctgctccggcgtcaggcgggcgttccgggaggaataggccagaccgttgccatgccttacaatctccgccccgtgaatgcgcaccggaaaatccaggtcgcgcaccatgcggcggataatggcaagctgctggtaatccttctttccgaaaatggcgtccgtgggctgtaccaggttgaacagtttggcaagcaccgtgcagacaccggaaaaatgccccgggcgagacgcaccgcacaatgttgcggacaaaaagctttcttccacggcaatgctgcgttctccggaatacatttcttcaggagcaggggaaaacacataatccacgcctgcaccttcgcacacctccaaatccttttcaggagtccggggataagtctgaaggtcggaggaattgttaaactggataggattgacgaaaatactggcaaccaccacgccatcctccccggccaacttgcgcgcctgttccagcaaagcgcggtgtccggcgtggagggcccccattgtggggacgagaaccacatggtcatgtttgcggtggtgcttgaggagggcagccctcaactgggccttggtggaaaatgtttgcatgcgcctaaagtggccccttgatgacaaaagttcaatcctgaaatattgctagaaggttgacgcatgccattccacatgtaaactggtaaagtcagaagacgctaaaaattatgagattcttcaaaacagcattaggtgtatcagcagcaatggcattaagcgccacggccaacgctgaacttaaggtagcgacggtggatgtgcagaaactcttcgccgactactacaagacccatgaagcccaggcggaagtagacaaggctgcccagacggtgcaggaaaccaacaacacccgcgcggaaaccatcaaaaagatggaagcggacttcaacgacatggtcaaaaggcttcaggatcccatgctgaatgaaaaggacaaaaaggagctggagcaaaaggcccagatcaaacgtcaggaagtcattgcgctggaacaggaacgccgcggatttgtggaacgccagcttaaatcccttcaggaacaaatgaaagtgcgttccgccaaaatcatgggagaaatcacaaaaatcacggaaggcatcgccaccaagggcaactatgacctcgttctggacaaaagcgcccaggcccttcggtccaaccaggtattcgtctacacgaagcccggcatggacattactcccacagtgatgaaagaactcaacaaagacgcccccgaagggtttgacccctccaagaaaaaggctccggccgtccccgccgctcccgcggccccggccaactaacccttgacattacccccgggaaggcggaatcatatacccatgaagcttacacttgaagccgtggccgccctcaccgggggaaaaatcctttccggcgaccccgaactgaccgtattcggggtcgcttcccttcttgacgcatcccgtgaagaagcctccttccttggcaatgaaaaatacttccaggacttcctgcacacctctgccggaatcgtgctggtgccgccgggcctgcctgcgtatccggaacacaccgccttcgtggaagtggacaacccctccatggcattcaacgccctggtgaaatatttcatggcttccgcctaccggttcacccccggcattcatcccacagccatcatcgaccccacggccagcttcaacccggacaaaatccatgtaggagcctatacctgcatcggggcccactgcgtaatcggagacgggacggacattggcaacggttgcgatatcggagacggcgtcaccatgggggaaaactgccgcctgcatgcccatgttaccatcagggaacgctgcaaactcggcaacagggtgaccatccagcccggagccgtcatcggttccgacggattcggcttcctgatgggagacaatggacgctacgtgggcattgaccaggtaggcattgtggaactgggggatgacgtggacgtaggggccaacaccactattgaccgcgccagattcgggcgcaccattgtgggggaaggcaccaaaatagacaacctgatccagctcggccataacgtcgttgtcggcaggcattgcatcatcgtcgcccaatccggcatagccggcagtaccaaagtgggggattatgccaccatcgctgcccaggtcggcatctcaggacacctcaacatcggttccaaatccacgctgggcgctaaaacgggagtcctctcggacattccggaaaactctacttactggggcatgccggctttcccctacaaggacgctacccgccaatacgccgccctcaaaaaacttccggcactgattaaggaagtccgcgcgctcaaaaaggagctggattcttccggcaaataacgggcaccatatcgccggaacgctctgcagcccctctccgtgtttctgtttcccgccgcttcaggcctgtcctgtcccccagcggcggtgcagaaaccgttccagaggagaaaacagaatcttgtcggacagcagcccaatcaccacaatcacaaacatgatgcctacgacctggttcatcgcgttcagttcgcggccgaaatgcagcagctggcccaatccgaacccggtcaggatgggaacaaaaatttccgcagccatcagggaacgccaggcaaaagcccatccctgcttcattccgctcaccacaaacggggcggaagcgggaagcgtcacatgaatcaggcaataaatgggtcctgctcccatagtgcgcgccgcacgggcataaatgggcggcacgttccgcatgccgttggccgtagccaggattacggaccacagcgtccccataatcaccacgaacagcatagccccttccgtctggccgaaccacagggttgccaacggaacccagcacacgctgggcagagcctggaaccccagggaaaccagccccagagtattctgcataagctggaaacgggagcacagcatgcccaggggaatccccgtcaccaggccgattccataccccagcaccagccttttcatggtaatccatgaagcctcctccagagacccgtcctgaaatgaagagcgcagatactcccatacttccagcggagagggaaacaaataaggcttccagaccctcaggtcgctcaaatactgccatgcccagaccacgagaatgaaaaacacgagcgaacaggcgtgcgccccccacttggaccatttgttcctgttcatgctgtggctcctttcaaatcacgggtgatgcgggcggacaatgccgccaaatcactgctgttgatatccctgggatgagggaaatccacgaaatattcctcacagacgcgccccggatgcggagtgagcaacaccacgcgatcccccaggcacacggcctcgcgcatattatgcgtaacgaaaacaatcgtcatgccgcagcgtaaatgaatctcctgaatatcctgataaagctgttcgcgggtcatggcgtccagggcggcaaaaggctcgtccatcagcaaaatgcgggggctggtagccagggcgcgggcaagcgccacgcgctgcttcattccgccggaaagttcatgaatatgagcatgggcacactctttcagccccaccagttccagattcttctccgccatggcaagccggtctccccgagtcagtccgggcaccagattcaagccgaacatcacgttccccatcacatccagccacggaaacagggcggactcctggaacatcacagtgcggtcccgtccgggtcccgtcacaggctccccgtccagctccaccaccccggaagaaggaaactccagccctgcaatgatattcagcagggaagtcttcccgcagccgctggcccccaccaggcacacgaactcgcctcctctgatattcaaattaatgccctccagagccaccacctttccgcgcctcccgtcaaacaccttgctcacgccggcaatacggagcttgcagcctccggggccgcaatgttctgcacccgcaatcatcttccgcccgcctccttcgccatggtcaactgttcctccgccgcctccggcaccaccaggccgcctatatccggaacctctttcataaatccggcctgatgggcgtcctgcacaaactgccggagcttgggaatggaaatcctgtccttgatgacaatgcttttccaggcctccgcaatcaatgccgggtctattctggaatgcgtcagctcctccagctccctgaccacgattaactgggtctcatccggatgcagccttatccattcgttcagttcctcatgcgcctgcaccagggctttcgccacctccggcttttccctgagaaactccgctccgcataccagtacggtcgcgatggactccttctcgtccaccagcaccctgcctcccgccgtcagcaccaggcggctcacccagggttccaccgtccacacgccgtccagcttgccctgccggaacaggctgagctgttcggggttgggagtcggcagaatcgtcacgtccccgccgcgctgcgtcacatgcaggccgccgcgggaaaaccaggcgcgggcggaaacatcctgcgtattccccagttggggagtagcaatcaccttgccgcggaaatccgcaggctccttcagcgaggaatccttcggaaccaccagggcggcgcctccttccacagctccggcaatcatcctgatatcctccccgcgggaacgcacaaacgcattgatggccgggctgggccccacataagccagttcaatggaccgggcgaacacggcttccatggcgctggggcccgcattgtacacgtaccagttgatcctgacatcctttccggtagcctccttcagccgttcttcaaaccaccccttcccctgccgggaaaaatgatgcgccaccaggccctgcacatgtgtcacgttgggaaaatgaccgaagttcaactccacgacattgggatcttccttctccttctttccgcaggaaacagccagcaggcataaaaacagggccggtaaaatcatcaggaatctggaacgggtcataagcaaaaagaatgggatactgaggcacagccgtttttccgcggcctttcaggcaccgactagcagaagaagccgccggaggcaagaagccaaaggcaacaactttgtcacaatgtggacagcaaaaatgcccgttttgttgaaaaacaatcccggttccggatctgaaccgggctttattgacaaacctgcacgttcccgttacaaaagcaccattcccaacccgccatgcaatcctcccccgaccagccctcatccggagcatggctgggccttcctccggatgaagaacgcccggtaagccggggcgccaggtaccgttgcatctttctgatgctcctgtactgggccgttctttccgccattccacaaggcgcggaccgccttgcagaaataggaacaaatctccctctctggatgggagccctggaactgactcccttcctgctggtgccggccttcctgttcctggcggtgcgaacaggcgcccaatggagggccttgatgataaccgtatatgcgggcctgttcctgaacctgctgatgaacctggcgcttccctcaggcgccatgtggggagaccttcccgcagccggcccctacggtacgcttgtctggcccggagggaaccaccgggaatggctggtcacgctgccccgttttccccaattctgggctctcgtcatctatgtcttcctctccggcagcggaaccccgcccctgcttcgcctgctggccctggcctggtggttcctgctttgcgtggcccccgtgaacacgggcatggtggggtatgcggacatcctggggcctctggtcatcatcgccctcgtcctcggctgcatgcacctggcggaaaaaagagcctcccggcaaaccaagggctaaaaatccagggcggccattccacggaagaaacagccgccccaggaccggcggacaccacccggcggaaaacttcccggcgccatccgttatttccagattacttcaaaaatatttacggaacttccctttttcccggtcaggccgagggccttcaccggttttttgacggatttcaggctgaacgtattcactttcctgcccttggccagattgcccacgggaacccaccgtccgtcagccccacaggccagcacggaagcctccttcccgtcggacaggacaatgacggaacccgcacggggaaaatcacagggaatctccgccctctccggagacagctccaccgggaggaacgttgccaggttgaaatccccggcagctccgctgtcggcggacttcccacccttgttggcaagattcagccggaactcttccagagtcacctcctgcggggaggaggaggcgttcaacagcctgatgcccttgatcactccgccaatatccgcggaaccgtcctccttcaacggaacctccgcccaggactttccatccatggaaatgaacaacttggcccacttcatatccggcgtcttcaaattgacggaggcggactccacggacgctcccgccggaatttgaaggcccagggactttttcggcggcaggggatgcacctccatgatgcgcttcaaggaaatatccctgtctcctgcttcaaccacggcattcctgaacgcgggagcatccgtcagtacggaaggcgctgcaggagcattcaccttgaaatcccggatggccgtccacacgtccggcttgcctcccggaaccccctgcgccgtagcgcggtaacgcacaaaccggccttttttgccatttccccggtactccacgcgaagcccgctggactccggcatcaggggagaccaggactgcccgtccagggaaacctccaactgtcccctgttcacagcgtccgtatcggaatcattgcggcccatcacaatggaaacggtgcgtatctcccgtggaactcccaggtccacgccgaaaaagtcacccttcttctgaacctctttgcagtaatagaacgactcggggtcgtcatccagcatcttctcgatgccaatcttggacttggtggaaacataaggcttcacacggccaacggcctgcccgctcacgcgggaaagcacgggggtggagcccatgtccagcagttcccgcacagcgggggccatcaccagttcggacggcttcacggcggtttgccacggggaattcttcttggtcacttccgtgacgtgcttattgatggccttgctgatttccctgctgtaacgctgcatctcggcaagcaggcaggcggcctccatagcatgattcagcgctccggcggcattccccacctctgtggcctcaatcatgcgcatactgttcaccccggctttccccagggattcgaactggatgagccacggctccacctctgcaacgaaagcgggattattagacttggcccgaatcgcggccggagcttgggctatcttcgcgaactcggccttcaggcgatcaaacgccttgcttccagacaccctggccccgcggcggcacagctccagcacctgctccaccacgggggcaatctctacggactcctctttgcggtaattgtgcccgctgggccccccgtcgctattatgatcggcaaacgtctgcatggcggaggagcagccggggaacaaaatacggatactgtccttccatgtcctgtcggaatcataggccttggcgttccaggtcatgttcgccacgctgaacagggaaatcttggaagcctccggcttatccatcggattggaagcaaacccctgcataaacggcatcgcgtccgcatccacgccataggtgcgccccaaaaacagggcatggcgcacgtaatccgtcaccgggaaattccaccagataaatgccggacgcttcaaatacttattaatccccttcaaagcaggagtccggatatcgctcacaatgctggaaccggtgcacatgatgcctatatccttgtccagatattcccccattacctcatggtagcggctaccaccgccggaatacgccgtggggcatacgatcaacggcgtcacatccggttttttgtggataaactccttattcaggtaattcaaaaactccacctggccctccggtttggccccctctccgccgatgtcgtcaaaaaatacggcaaaggaacggaatcccagatcatacatcatctcaaacttcttcacggccgccttccgatccgcctcgccccagtgaatatccgctccgggatgcacggcccagacaaaattcaccttattctgcttcgcgaccttcaccagctctttcaggtccttcgccatatctgcgggataaggctcgcgccagcgcttggaaaaaccgtggaacacgtcatccttcgggccgtagatgtaagtattcatcttatacttcccgtaaaatttgaactggctgatgcgaccttcctgcccccagggcagaccgtaaaacccttcaatggtaccgcggaaaggaacatccggccaatccaggacctccacttccggcactgtcacgccggaagaagtcttctccgccaactgcaacagcgtctgggccgcgtaaaacaggccttcgtcgtcataccccgtcatccgtattccctggggcgtaacgctcagggaataggccccggccttccggggaacattaccggcaggctttttgcttcctttgatgatagtcatctgcacaggcagcccgtttggagcgagggaaaacatgcttttcagggcattcacggtaggttcatcccgcgcgcccaacagcttcagggccggaaccgtcacggaaccgccgctcctggtcatcttctgcggaatgggatacaccggcatcttggccgtttttccggcacgggagccttcaggagaggcggaaaaagccggagaagaagactgggcagaaacaggaagggcaaggccggcccccagcgcggcggcagccatcatggattggaaaagtatcagattcatacgtgcaaaaataaaaagcctgtacaggccaggttcacgaaactacggccggattgttccacttctaacaggctcctctccgtatgtcaaaatactttgccccgcaccggtaacatgtcgcccgccccgctgcaggggataactccagggacaaaccgcagcgacttttcccgggcaactattcccggcctacagccttgccgccacttcctccaacgtctccacacgggccgtggcgagggtggggacatcttccgcagaaaacaggaaattgcggcctactccggcggcaagagccgcccggatgtcccgctcccggtcacctacggacacgcaggctttcatatccagcccatgcgcggcggcagccttcaaaaacaggccgggattcggtttccggtcgggatgtccgtcatccgcgctgggacagtgaaacacacctgcaatctccgcaccggacgaacggaacacccctctcatatattccgtcaaccgctcaaagtcatcttcagaaaacatgccgcgtcctatgccggactggttggtcgccaccagcaccagataccccttctctttagcctggcggcaaagattcagaattccgggaaccagccggaagtcctctatgcggtgtacatacccgccatccacattaaccacaccgtccctgtccagaaacaaagccttacccgccatatatctcccgttcaaccagttcgcaaaccagatgccccactgcaatgtgcatctcctgaatgttgttcgtggcatcggaagggacggcaatgcaaaactccgcaacttctttcatctctccgcctccgcggcctgtcaaggccaccgtccggacgcccatccggcgcgccagctccatcgccaaaacgatgttccggctgttgccgctcgtggaaagccccaccagcagatctccgggacggcccactccctccagctgcctggaaaacaccgtctcataaccgtaatcattgcccacggcggtcaggatggaagtatccaccgtcagggccagcgcattcatggcggggcggttcagcttgtaacgccccaccaattcggcggccaggtgctgggaatccgcagcggagcctccgttgccgcagaacatgatcttattcccggccttaagggtatccgtacaaatgcgggcaacctgctcaatatccccggccatggaagccagggctttgaaattgtccgctatccctaaaatctggttcctgatgtattcgctcattccgggctgcttttcatgcggttgatgatattggtggaggaaaaaccctccaggcggggcagttcaagagcctgccctccataagatttcacgaactgtccttccggccagcattccaggggatacccttctttggcaatcacgtccggacgcagcttctcaatcagcggcagagccgtatcttcatcaaacggcactacataatcgacaaaatccagggatgccagcagcagggaacgcatctcctcattattaatcggcctgtcctcgcccttcagccgcttgatggaggcgtccgtattcaaccctacgaaaagcacgtcgcacgcttcacgcgccttcataaaggaatgcagatgccccaggtggagcaaatcaaaacaaccgtttgtaaatccaaccaccttcttctcacggcggaaacgttccgccagctccgccgcggcctccggcgtcaggatattgtcgcggtgacgccaggagggcgtctggatatccttctccttcaacgcctccttcaattccgttccggtcacgctggccgttccgaacttgcccactacgatgccggcggccacattggacacgaccagagcatccggcaccgcggctccggcggccagcgccgcgcccagactggcgagggaggtatcacccgcaccggacacgtcaaaaacatcccgggcctccgtaggaatgcagacaaaatcggaagggctggaggaaggaatgaaaatcatgccgtgttcgctcaaagtgacaatcagattctcaatgccgaattcggaaaacagcctctgcgcccccgccacggcatcctgttcccacccgtccatggcaggattgagcgccacgccggtagcctccaggaactccttcatattgggtttcaccagcgtggcccgcctgtagcgggaataatccgctcccttcgggtgcacaatgacgggcttgcgcgccgcacggcaccgggcaatcacatccggggcggttcgtccgtcaaacaggcctttcccgtaatcggacaaaaggacaagatccgcctccggcaaacaggcatccactcgttcaaaaaaacgggaagccagctccggctccatcctcagcggctgttcctgatccgctctcagcaaatggtgcttgcccgccacaaaacggatcttcacggtcgtctcgtacccttcacactccaccagctccggaacgcagtgcgtctcttccagaaaacgccttacctgccgcccatggccatcatccccgaccacgctgataaaagtggtgcggcatcccagcgcgcacagattggacacgacattgcccgcgcctcccagcatgcgcgtctcccgatccatcttcatgatgggaaccggagcctccggcgaaatacggctgacgctcccatacaggaacttatccagcatcacgtccccgatgcagagaatccgcacccgggaaaatccgtcaatcaatgtatgcagccggttcatgggagacgcctctttctaccacgccccctgttataaggcaaggacagttgaaccgcgctccggaaccggaaaacggggcaacgcggccgcttcccgccgttccggacggcagaactctcattcagtggcaaaaaataggtcagtcatgataaaaatcttgacctgtaagcaggaaagcactacctattgtctcccgttcccggacgaatagaaaaaggaaaacaaatcatgcgtgaagttaccgtaagaaaaggtgaacctatcgaccgcgctctcaagcgcctcaaaacaaaactggatgttgaaggcattctggatgaaatgcgccgccgccgcgcctttgaaaccccgatggacgaacgccgccgcaaggcccgttccgccagcaagcgcaacaaggtaaaatggcgttacagcaacaagagcgaagaaaccgcttccgaaactgctgaaacacccgcttccgctcctgaagcttaaaacagtattagttcgggaataagaacccaatttccatgagggcaaccctttctcaaggattgccctttttgcttccctctgcacatgaatcagtcagcccagctcttctcccgcgcgcgctccgttatccccggcggagtcaactcccccgtcagggccttccgcaatgtggacggggaccccttctttgttcaatccgccaaaggagcctacatcacggatgcggacgggcgccagcttattgactacataggcacatggggcccggccattctgggccacgctccgcaacccgttctggacgcagtacatgccgccgtggacagggggctgggctatggaattcctgcgccggcggaagtggatatggcggaaatgatcacggacatggttccctccgtggaaaaagtgcgcatggtcaactccggaacggaagcaaccatgtccgccatcaggctggctcgcggctataccggacgccgtaaaatcattaaattcatcggctgctaccacggccatgtggactcccttctggtggcggcgggttccggagcgctcaccttcggagaaccggacagcgcgggcgtgcccagggaaatgacgcagctcaccctcaccgtgccctacaatgaccgggaagcagtaaaaaaagcctttgaactccatggaagcgacattgccgccgtcatcctggaaccctttcctgccaatgccgggctctactttccgcaaaacgacttccttcacttcctgcgggaaataacgctccgccacgacgcccttctcatctttgatgaagtcatgacgggcttccgggtcgctcccggaggcgtgcagcagctttacggcatcactccagaccttacctgcatgggcaaagtcatcggcggaggcctccccgtgggagcttttggcggccgttcggaaatcatggactgcctctctccgcttggccccgtgtatcaggcgggaaccctgtccggcaatcccgttgccatggcggcgggattggcccagctccgggaactcctgaaagggaacgcctatgaacgcctggaacagctcggagcacgcatggaagaaggcatccgcgaagccctcaaaaaacacggcagaaattacagcttccaccgtgcgggctccatgttctgcctcttcttcaccgaagaggaagtctataatctggaatccgcgcaaaaagcttccaaaaaactcttcaaatccttcttctggaacatgctggaacaaggcgtctacttcgcgccttccccgtacgaaacgggctttatctctacagcccatacggaagaagacattgaccgcacggtggaagccgtccgcatcagtctctccaggctgggttgacatgcccctgatttgaagtgacagctcacggcccttcccctataaggacttcatgagacaaatgacaggaaccatgctgcttctgtcctcagcagtcgttatggccgctccctgggcgcatgcggaggaaaagacaatccagctcacggaagcggaacaacaggaaatcaagacggcaaacgaaaagctgctgggccttaccctccgtttcctgcatgactcctggccgctggaaatcatgtttcccggagaagtgcaggaggaattccactccattcttcaatgccatcagatgctggagcaattccgccaaaccggcaacctcctgctccagacgccggaccgcaccacgcctctgcacctctgcattgccctgggattaaaccggctggccgtccggatggtagaggcgggcgctcccgtcaatgctcaatccatttttatgcatgacggcacaaaagagccgggagacaccccccttacctgggcgtgcctctcaggcctctatatgaattccaccgcggaagaaaggctgccgctggtgcacgccctgctcaaacacggcgccgatccggatcagccggggccttggggcgtcaccccgttcatgtattccgccgccctcaatgactccgatccgggtcaggaaaaaatagcgctggcgctcttggacgccggctccccggatctcaagcgcagaatgaacgctcaggcgcgcggagtcggcttcctcagtctgtcccccgccatttacgaacggctcatcaaagccggctgcgatgttaacgaacgcttttttgaaagcaagcaatcacccctccacctggtctgcaccaaggaaaaaccagcagaacgcctcattcctctcattgaacttctcatcaacgcaggagcggatcccaaccagccggacgtggatggcctgactccgctgatggcctgcaactctccggaaatagccgtttgcctcatgaatcacggcgccaatccctctctccgcaacgatgacggccagacagcctatgacttccatatgaaaaacgggtatccccccattgcggaagccatcaagcactggcagtccaagcagaaaaaaggggaagcccgctaaatagcggacgccatcgcaggctttgcagccctccttctcccactggtgcgggaaagaaaagcggataccgtcacggcccgggaacaggcggccggaaccctctccctggaacagccgtgcttccgaagccatgcaggcagccccccctgtttcctgttataaaaaagccgcttccccaattcaggggaagcggccttgaaaaccacaggaagaaagaattattcctccgcttctatgccttcgccgatcatcttgggatcttccggcatcttgcctgttgtgaagtaaccttcaatttcctccagggaacgtcccttggtttcaggcaggaagaaggtcaccgtaatgaaatacagcaccgtaatgccgcccagcgtaaagaacacgccggaataaccgcagctgcccacccacgggaggaaggaaccggcgataaccgtggaaaccagctggttgatcaacagagcaatcgccataccgttggagcggatgcgggctggcatcagctcggacagtgccagccagacgcatacgccggggccggtggcataaaaagcaatgaagataatgaagaacgcagtcacgccccagcccatggaggtatccggcttttcgcccaattccgccttcagaatggaaacgggtttcatggcatagccgtccttgccgttcaccaccattttattggtggaatccggaacggccttgatcacggccagggaagccttgtcctcatccttcttgatatccttgatatccttagtcagttcagaaaactctacgacggaaagctgggtggaagaccccatcaggaactggtaccaggcgggattggcttccggctggtcataggtgatgatgagctgcatcctgttgatgtccttgtcggccatgccgttcttggcaagaagattcctgatgaagggggaatccggagtacgttccaattgaagcgtgcggatggaacccacatccttgccctgttcaaactccttctggacggaagggctctgggcggccagcagggcagccacatccgcagtcacatccttgcgggctttttccacattattgaacaggaacccggtaccgagaaggccgaccacgatgccggccgttccgattttaagcaggaacttgcggcccttgcggtccaccagcaccatggcgacaatagtcatcaagcagttcacgaccttgatggtaaagtctgcccagttggcggtggtgccttccaggccggcctgctggaacaccttcacggaataattcagcacggaattaatgcccgtagcctgcgtaaacgccagaacgagcaccgccagaacaaagggatagatatacttgcgctgaagaagggactcgccggaagagctctgctttttgagttcctccgccttctgcttctcttcctcttcaatatggatcatttcatcaaacacttccttggcgcgggcatccccgtaactgcgcaccagcacagccatggcttcatccttgcggccgcggcggaacaggtagcggggagattcgctcaaacggaaggaaccgaaaaacaggaacaggccgggaatggcgcaaacccagaaaatagcctgccaggccagaaccttggcggaagtcagcgattcttcgctcgcgccggaattctcgacgccgcccacataactggcggcaagcaaaccgacgacggcggcaaacaccaggcccaccgtcagcaggaactggaacatccccgttcccttgccgcgggactcggcgctcaggcactcggccagatacagcggaacgaccacgcccacaataccagcgctggcgccctgaagaatacggcccagcaacataatgccgaatacttcctgggacaggcagatcacggggatgctcgccgtgaacaaggctgcggccacggtaatcaacgccttgcgtcccatcttatcggccagatagcccgcaaacagggaagaaagaacgctgccgaacagcacggcggccaccacctgggaaagctgggagggattaaaaccggccgtctgctcaatgtagggaagcgcggcagcaatcacgccaacgtccacaccgtagagcaggccgcccaaaccggccatgatgaggagatagcgcatatatcgcctggccgcatccggaacggcggctttcatgttttcttggtctgtcatggtcgttgcattctagtaaattggctcttctccgcaaccaaaaaaagacgcttcccgggcaaaaacaaatttcctccccggaaatgcgttcaaatgatgaaaatatcgcaaaagaaacaagtaacaaactgtccgggaacaggaaatcatttggacacctctgcagaaaagccctcatgcatcccccggttccgaaaaacagccatgggaaaattccggagccgcacttcaattaccgtaacaatccccgtaaaccgtccgggaaaaaaactccccttccgtattgaagccagaaaaacagcgcgatgcgccatcacggaaacggaagccgcccttaccggcctcctttggcggaagaatctatcccaagccgcttttcaatcaggttcacagacaactccgcgcacaggcgcaattcgttatcggcgtcgtgagtgaaagccttaagcgcggacagggaagcttccgaaccgatttccccaagaattcgggcggcggaacgtttcaacacaaaatcgtccgactcattcagcgaacggatgatatcagcttctcccgttgggccggcagccttgcattcgtcctcccacttctggggatcctttttccattcctccagaagcaacgccaaacttctcttttccgaaccatgcagtaaaaacctgatcagagacgccgggatttcgcaatccgccttcttcagctccgtagccacgtaatcaaccacgcgctgagcctcctcatgatccggttctgcccataccacaagggccgaagccaacgcggtcacatattccgcatcacgcccccacggttcccggagaagctccaccagcctggaagaaacctcaccccgcatcttatccggatttacagccgacaaacgttttgcggcggcaataacgcggcggatgtccagacaggacagctccttcaaattggccagcacgaaatactggtggcgctcatcctgcaacgcggcggaagcgggccgcgcttcaaacctgtcccggttcagaatcacttccacaaaaaaacgctccttatcctgcagggacaccttccccatcttgcccgcaacctctacaaattccttaaacgtaatgggagtgggagtaataacgaacagcccgccgcccgttcccttgcggtcataaaaaataggttcgtcctcggactgggtcatcctcttcaaatacgcctttaccatatcccggttggctgcattcaccccaaccacccatacgcccagaaccccctgggattccttgcggtcaatagcggaaaacagaggtttcaaatcaccggccccataattctggacagaagcgttcttggagggcagctgctccagccccatgctggtaaagccggagacatcttcttccctgacactcccctcttcatgccccccgagcagggagggattcaccttgaccggatacacgaaaggcagggaagcaatcccccctgcaaccagcaaacccagcaaaatgaaaacaatcttgtgcctgcgtccggcacaggccatcaagcctccggcaagacaggcaaaaaacagggcaaacgccttctgctggggctgctgcagcatggaaaggaaaaaggtcccatccatctcggaagaagcattgtaaaaaatccagacgcagccggcggcaacagccagggacgcgcaaaggcacaccaattggatcagccccgtttccaccagggcgctctgaatggcttcccttctgtctttgggggaatggacggaaacggctttctttgctttggcaaaaggtttcttaggaatcagtttttccctgtcgcaaagaaactcatgcccgcatttgctgcaattcaccatagagccctccgcggaagaaggcacattgatatgtcgtttgcactgtggacaattcagattcaccgggctccaatatgcacgtttttcattcttttgcaatacctgtcttcccaactttcctcttaccatgtaccccgcgaaaattggcaagaaacttccatcggctcttatttccatcatttccccttttcattccgactctctgattttttccgaatgttaaaactcgctcaaaccgctctcattgaaaataacatttaattgaaaaccattccgcaaacttcggaaaacaaggtaaagggaaaattcccatctttccctggcggaaagctggagattgtttagtctcccttatcagggtctcacatttccaaacgcaccttgatataaattatttgaattttacaacacgggccattgaaaaaagataaaaacgctctccatgctcctcctcccgcctcacgtcattccgagtgaacacgcttgcagaagaggaaatttggtagtagaatttccgccatgtcattgcagcctgccgaacgccgagatttcatccgcgatatgatttctgatgaccttgcctccggcaagcatcaggccccggtaacacgctttcccccggaacccaatgggtatcttcatatcggacatgccaaatcaatctgcctcaacttcggcatcgcccaggaatttccgggtgcgcgctgccacctgcgttttgacgacaccaaccccagcaaggaagaccaggaatatgtggacagcattcaggaagacatccgctggctgggctttgactggggcgacaatcttttctttgccagcaacatgttcggcttcttttacgaatgcgccgtttccctcatccgcaagggattggcctacgtagacgaacagacggtggaggaaatacgcgcccagcgcggcaacgtgaacgtgcccggacaggaatcaccctaccgcaaccgctccgtggaagaaaacctggcacgcttccaggccatgaaaaacggggaaatcccggaaggcagagccatcctgcgggccaggatagacatggcctccagcaacatgaacatgcgggaccccgtgctgtaccgcatcatgttcgcggaacaccacaacacgggcagttcctggtgcatttaccccatgtatgacttcgcccacccgctggaagatgcctacgaacacatcacccattccctctgcacgctggaatttgaaaaccaccgccccctctatgactgggtcattgaaaactgccccgtcccggcacgcccgcgccagacggaattcgcccgcctgaaccttacctacaccgtcatgagcaagcgcaagctgctgcaactggtgcaggagggacacgtctccggctgggacgatccacggatgcccaccgtctccggcatgcgccgccggggctacactcctgccgccatccgcaacttctgccacaccataggcatcactaaattcaacggcttcacggatgtggccctgctggaatacagcgtaagggaagacctgaatgccaacgcgccgcgccgcatggccgtgctcaatcccctcaaggtcactatcaccaccctgccggaaaacgcggaagaaatggctgaagtgctgaacaatccggaaaaaccggaagagggcgtccgccgcctccccatcacaagggaagtctggattgaacgggacgacttcatgctggaccctcctaaaaaatacttccgtctggcccccggccgcaccgtacgcctccgggggggctactgcatcacctgcacggactacaagcaggatgcggagggaactatcacggaaatcttctgcgaacacattcccggcaccatcggctccaaccctccggaaggaatccagtgccgcgccgccattcactgggtaagcgccaaatacgcggtggacggagaaatccgcatctatgaccgcctttttacggaagaaaacccggacgctgctgaagaagggttcctgtccgtcatgaatccctcttcgctggccgttatcacaaacgccaagctggaaccctccctggccggagcggaaccagaattccgctgccagttcgaacgtctcggctactttgtggcggaccgcagggactatgtaccgggccgtcgtcctgttttcaaccgcacggtggctctcaaggactcctgggcaaaaaaacaaaaataacctctcttcatccccttttatggacaatcaacttcaattctgcaccgttgaagaagccgtggaagaaatacggcagggacggatgatcatcgttacggacgaccctgggcgtgaaaatgaggcagacctgatcattgccgccgaattcgctacgccggaagccatcaacttcatggttacccacgccaggggcctcgtctgcgcacctctttcaccggaacgggcggacgccctccaactcccgctcatgacctccgtcaaccgggaaaacatgtccacagcattcaccgtctccgtggatgcggcccatgacatcactacgggcatcagcgccgcggaacgctccctcaccattcgcacgctggcagaccccaaagccaccgtcaacgactttgttcagccgggtcatacattccctctccgcgccgttcccggcggagtgttgcgccgcgccggccatacggaagccaccattgacctcgtgcgcatggcaggccttcagcccgccggcgtttgctgtgaaatcatgaaggaagacggcaccatggcccgcatcggggatctggggggattccagaaaaaacatggcctgaaagcctgcaccgtagcccagcttattgaataccgccgggccaaggaaaagcaaatccggctggtggaaaccgtcaacatgcccacagactacggagactttacctgccgcctttatgaatcccagctggacggagctcttcatctggccctggttcacggggaaatctccccggacaagcccacgctggtgcgcgtgcatagcgaatgcctgacgggagacgtcttcggctcccgccgctgtgactgcggcagccagctgcacaccgccatgcgccgcatcgcccaagaaggaggcgtcctgctctacctgcggcaggagggccgcggcatcggactggcggcaaaactcaaggcctacaaacttcaggaacagggtctggataccgtggaagccaacctcaggctcggctatccggacgacctgcgcgactatggcatcggagcgcaaatcctgcatgacctgggagcaaaccagttgcgcctgcttaccaacaacccgcggaaaatcgtggggctggagggctttggcataaaaatcacggaacaggttcctctcatcatcccacccaacgaacaaaacagcaaatacctggctaccaaaaaatgcaagctgggccacatcctgtaacattccactccatcccttcatgtccacggaacttccccgccgccagcgcgccacgggcacgcgcgccaaaatctgcatcgtcgcctcggaatacaacgaacaatacacccaggccctggtagaaaactgctcggaagaactgaaaaccgtgcttccctcgatccgcctggaaatcatccgcgtgccgggagcctttgaaattccggtggccattaaatccgttctctcccgctctccggaaaaacgtcctgatgccgtggtggctctgggggtcatcctgcgcggcagcacagaccacgcggaccttatcggctccaccattacccaggccctgatgcagctcgccctggaattcaccacccccgtcattcatgaagttctgctgctgaatgatgaaaagcaggccttcgcccgctgtatcgcctctcagctcaaccgcggccgtgaagcggcccgcaccgctgcccgcatggcggaactcttcctcaactccctgctccggcaataatacctattactctctcctctctatcgccatgctctcacgcaaccaaatcagacaagccgccctccaatacctttacgccgcctctcagacgccggaaacggaacgggagggaatctgggacatcctgatggaacctttccggggcgactactgcaaactcaaggccaaggccgtctccggccatcttacacgggactatccggacaagctgcgcctcttcatcacccgtgcgcgggaaacggcggacaaacttcagcaagacccccttaccctgcccgtccgtgaccagcttcaggacctgctggccaaggaaggagaattcaacgcctccctgctccggctgaaaaaagccctgcacgaggatccctccaatgacaggggggctctttccgccgcctgcgacgccgctcagggactcaataccgcactgatgcagatgcgccgccgcctgctggacacgctcaaggacttccccgcctataacgcaatctggccctccctcatttcctcctgcagcaaactccaggaaatcaatgaccgcatcaactgcctcattcacccggacgaccgcccctccctggcggaaataaaaaaagtggtggaggcagggagggatgcggaggaactctaccgggaagccaaaaccctgggagaagacatcctgcgccgccgggacgggctggacgccgccatcgactccaccctggaaaactactcccctgaacgtgtcagcgccattgaccgcgccattctgcgcctgggggcctatgaactcctccatcgcaaagacctcccagcccccatcgtcatctcggaggccatccgcctgtcggaacgcttctcctctgcggaatccccccgcttcatcaacggcgtcctggccggaatctcaaaaacgggacgcccggcataactccgcttcgcaccatggcaggattctttaaaaaactattcaccaaattttcccgaagctcccggatagactgggaagaactggaagctgagctggtagccgcggacatcggcatcaggcgcgctatgggtattgcggaccagttgaaggaaagcaaaggcctggatgcggaaaatctggtggaatccacccgtgaagtgcttcgccgggcctttccttccaccgctccgtccctgcccgcccctccggaaggcaaaccgctggtcattctggtcgtgggcgtcaacggcaccgggaaaaccacttctgcggccaaattggcccatttgctgcaaaaacagggctcccgcgtcctcctcgctgcggcggacacttttcgagcggccgctgtggaacagcttcaaagctgggcggacaagctgaacatccccatctgcaagggagcccccagccaggatccggcctccgtctgctatgaggcccatacgcaggccatcagggaaggcttccaatacctcatttgcgataccgcggggcgcctccatacgcgccacaacctcatggaggaactctccaaaattcgccggactctcgccaagcaggatgcatccgccccccacagcaccctgctggtggtggatgccaccacaggcgctaacgccctggcacaagccagggaatttcataaagcgacacccttggactccgtcattatcaccaaaatggacggttccggaaagggaggcgtggccgtagccatcatggatgaaatgcacatttccccctcctttctgggaaccggggaaggagccgaagactttgaacccttcaaccgggactgctacgtggattccctgctgtaacgggaccgcctcaaatccatgccaccgcttcccctcatcactgcccagacggaggaaaagctgctcgccttcctgacggaacacgggcacactaaattccgcacccagcaggttctggactgggtgtggcgcaaacgcgtcaccacctttgacgcgatgagcaacctccctcccgcgctcaaaaatctgctggcggaaaatttccgtttccacacgccggaaatcgtggaaatccacggttctgcggacaccacacgaaaattcctcaccaaaatggaagacggcagtctggtagaatccgtcatcatccctgccgcagcagcggaaaatggagaaaaatcggagcgcgtcaccctttgcgtttcttcccaggtaggctgcgccttcggctgcaaattctgcgcttccgggctgctgggccttaaacgccacctcaccacgggggaaatcatcgggcagattctctctgcggaagccattgcgggaaaacgggtcaacaacatcgtcttcatgggcatgggggaacccctctccaattttgacaacctggcggatgccctggaaatcatcacttcccaccgcggtctggaaataggggcgcgccacatcaccatctccacgtcgggattcgttcccggcctgaaaaaactggcggcctatcccaggcaaatccgtctggccgtttccctgcacggagctacggacgaagtccgcgaccaaatcatgccggtcaacaaaaaatggccgctctcccagctcattccggcccttgaggaatggaacaggggaagaaaccagatgcccacgctggaatacattctcatcagggacatcaacgattctccaaaagacgcgtcccatctcgtccggatcgccaaacgcctgcacgccaaagtcaatctcatcccgtacaacaccgtggaggggctcccgtggaaacgcccttcggaagaacgctgccgttccttccgggatgcagttcacaaggcgcgcatccccgttaccatgcggtatgaaaaaggccatgacatcaacgccgcctgcggccagttgaggctgaggaaggaacaggaaaagagcggaaagacgtcccgttgacggaacggggcttttccgaatttacaacgttgcctattgcccggcgccctccgttgtgctatcctttccggccggatgccacccatccagcagcctcaccatggaaactacgacaaccaccactgccgttcccccgctggaactgaccagggcaccccgcaaaaccccgtccctggacctcagggacattccgcaggctcccggcccggaaaaaggagtgctggccctcatggccatggagccggccacttacgtggggcagtgcgtgaccatcggcatgacggaggactacttctacctccccgcgcacaagctgctctggcgccttttccaggcccgctataacaaaaacgaacccattgacatcgtttccatcacccaggctttggaagacatgcaccagctggaagccgtgggcggaagcgcgggcctggcagaaatatacacctttaccactaccggagcctattttgagcattacctcaatgtcctgaaggacaaattcatccttcgctccatcattgacatagccaaccagtccaccacgcaggcctttgacaatccggacgacgtagcggaactgctggattctgtggaaacccatattttccagatacgggaacgctataacagcgccaaggatgaacaaagcctggccagcatccttaaacaagccgtcaccaattttgaaaaattcatcgcaagcaaaggccaaatccagggactgaccacgggatttgaggaactggacaaaaaaagcaacgggcttaaaccgggggacatgttcatcatcgccgcccgcccctccatgggtaaaacctcctttctgctcaacatcattgagcacatcgcgcttaacgaaaaaaagcctactctgctcttttcctgtgaaatgcccgcagtccaaattgtggaacgccttctttttgcccgctccggagtccgcagccgggaaatcatcaagagaggcaacctcacccagcttgaaatgaagcatttcaagcaagcggtcaaggaagtgggagcttcccagcttgtcattgacgataccgcagccatctccatcaacgaactccgggccaaagcgcgccgtgtcatgagggatcagggaggtctggccgccattggtgtggactatctccagctcatgcgctcccactccaaacaggcggccaacagtcgtgaacgggaagtggcggaaatatccgccggcctgaaagccctggccaaggaactcaaagtgcccgtcatcgttctggcccagctcaaccgcggcccggaaagccgcacgggagccagcctgggcgtcccccgcatctccgaccttcgtgaatccggctccatcgaacaggacgcagacatgatcggcctgctctaccgctccgcctactatgcggaagatgaggaaaaacgccagcaaatggccggacgggccaatctgcatctggccaaaaaccgcaacggccccacgggggacgttccgctccactttgaagcggaactcatgcgcttctccacacgtgaggcagatgaacacgaccaggaaagcgaataaaacctctcgctgtctgtgcctgttctctgcggattaacaatccgttacaggctgaaaccgaagaaaattctgtttgattcgggaaaagttacaagtttctacggtcattgaaatgatacgttctttctacatgtaactatttccagaaaagggaattctcaaaattttattgcaaatttaaataccgcaaaggcctgttgagttttcattggaaaccgatgatgccagtcgggcttgatttcatgaaaacgtcctctgatacgaaaggaaagtctacgcaagttattttctcttagaatcaaatcttgaccccggattgttaaaccggtagcatcgcggcaacgtcagcatttcttctggccttattgatcaaattatttctgtttttaatatgaaaaaaaacttatttattgctgcaatcctctgcggatcatgcatctccgctaatgccgccagcatggtcacggaatggaccggcaatgccggccctacggaaggcaacacctatgaactgggcaatgcagacaactggagcaacggtgtacccgcccgcggcaacaaccaggggccggatgtaatttttaataacaccggaaccatcaccctcagcggctccatggtggacacatccgatggcggcagcattactgtcacaggcaacagcaatgttacggtggggggaacccgctggacgggaaatgtcaccattggagcaggttccgctctctccctctcacaagtggactttaaaagcagtgacatcatcctggacggcaccttcaaccttggtgtctgcgggattgattccggcggcaacggcgcccgccttgtcttcggcattggaggcatcatgaacgtcaaccaaaaaatatggggggcttcggacttctccgtttccggtacgctggccaccacatccacggatctggctgctggagaattccagtttgttacccgcacgctgattacctccgccggctttgacggcggttccatttccctgggagacttcaccgctgaagacggcggagcactgaccaaggcatctggaatcatggaagggaacgccgcagactaccagggccagtactatctctacacggaagacgggaatgtcaaagtgcagtacgttgtggcgggagccgtgccggaacctgctacggccaccctcagcctgctggggctggcttccctgatgctgcgccgcaggcgcgcctgaccttttctccggcccctttcctcaacagcctgtatgcccacgcgtacaggctgttttgttttccaggcgagtgacgaaaacgtcacggaaaacatcttcatgccattgccgggaatccgtagcattttttattatcttccgttcgacgtcatgcaagcccacgcaaaatcactcaacgaacgtttccgcaccctcatctccctgattttcggtctggctatcggctgttccctgctcttcggggaatcccgctgggaaacgtctcctctcattgaagaaagcctcatgctcctggcctgcttcatggccggcataggcgccttcgggcgcatctggtgctccctctacattgcaggttataaaaacaacgtcctggttactgacgggccatactccatgtgccgcaacccgctctatttcttcagcttcgttggcggcataggcgtatcctgcgctacggagaccttcaccatccccctgcttacggcgctggcgttcggaatctactacccgtccgtcatcagaaaggaacaggaaaggctcctcacccttttcggagacgcctaccggaactattgcaggaacgttccctccttcattccctccctctcacggctcaaaccgccgccggccgcctactccgtcaatcccgccacgttcacgcacaacattgtggatgcgctgtggttcatctggttcatcggcatctttgaattcatcagcgggcttcatgaagccggaatgcttcccgtatggttcctcattccgtaacaggctcttttctcctggcatccagaagccccgcaagcgcccgttgggaaaccatcttacggaaagatgagcgatcccgcggataaagcatcatctccgcccgcgtctcccccccccggaaagcccaggcaagccatacggtccacacaggcttttccggcgtaccgcctccgggccccgcaataccgctgacggcaacagcaacatcggctccggagcgttccagagctccttccgccatcgctttaaccacgggttcgctgactgctccgtaacgcttcagaacattctccggaacgcccagcatctccgtctttgcccggtcggcataagtaacccatccgaattcaaaaaccccggaggcccccggaacatccgtaatcctcttggcaatcaggccgccggtgcagctctccgccgtcgccgccttcagaccctgctgcgccaaatggcacacaaccgctttctccagggatgccccggcaggagcgagcacatacgccccggccagaatgcgcaaacgggcttctccctgtttcagggccacctcactgcccaccaggcgcacgtccacttccccgacgcgcgcgcaatacgccacctccaggccctccacctggtgcagggaatcatccaccagctcctggagatcgctctcccctatccctaccaggcggaacacgcgcaaatgaggaatatcctcatccgccaaatcttccagaagcggcatcacggaatgttccaccatcggcttcaactccgccggcggccccggcagcaggatgaacatgggaagggaaccgctggcaggcatcaccagtccgggtgccgtcccattggaattctccagcaccgcggcgccatccggaaccatggcctgcttgaaattacactccgcaatgggaatccccctccgttcaaaataactcttcagccactcagccacacgctcgtcacggtgcatgtccacgccgcacacgtcgcacagggcttcccgggtcacatcatcgctcgtcggccccagtcccccgcttacaatcacgatatctgcgcgccgggcgctctccctcatggcctcgttaatagcgtaaccgtcgggcacgacggttaccctccccacacggaacccggcctcaaataatctgttgcccagccatgcggcatttgtattcacaatactccccagcaaaatttccgtcccggtgttgatcaattcaaccctgatctgtttcatgcagccagtatgctctctcaagcaccccgtgacatgcaacaatcctgccatgtatcataaaaaacttcatttaaactccccgtaagatacattaggggtactgacaaagaccatgaacacaccttcccggccccgggccaccaaaatcatctgcactattggaccagcaacagacacttccgacatgctgggacagcttattgaagccggagccaacgtcttccggctcaatatgagccattctaaacacgactgggtccgggaagtcgtcttccgcatccgccggaaagcagcggagctggaagcgaacgtggccatcctatttgacctccagggtccctccatccgtacgggagacctggccgaaccctaccatttgaaaaagggagacacggtagaaatccgcctgggcacggccaagccggaacttcctttttccaccacggtaaactatgacggccttctgcaggatgttcaggcgggccataccatggtggtggataacggaggcatcctcatgcgcattgcggaagtacgcccggacaggctcatctgcgacgtgctcacggaaggcgtattcggctcccgccgccacatcaaccttcccggcgtagcgctgcggctcccggccctgacggaaaaggatctggcggacctggccgtggccgtagaatgcgagacggactacgtagccatgtccttcgtccgggatgccgcccacattgcccagctccgggaacacatcgacaacttgggaggcaaggcccagatcgtcgcaaaaattgaagaccagcaggctgtccgccacattgacgatatcatcctggccgcagacgtcatcatggtcgcgcgcggggacctgggcattgaagtcagcattgaagaactgcccatcatccagcgccgcatcgtccgccattgccacaggctgggacgccgctgcatcgtagcaacgcatatgctggaatccatgataacccagcccacccctacccgtgcggaagtcacggatgtttccaacgccatctttgaacaagtggatgccgtcatgctttccggagaaacctccgtgggccattaccccgtacgctgtgtggaagtgctggattccatcgcccaccgcatggagtgctccggcaatctcaacttcgcggcatccgccatcctgaacggagaccgccagaaagccaccaaggcagccatctccctggcggactccgtggaaaacgcctgtctgatcgtctttacccgccgcggcctggccgccacgcaggcagccgtcctcaggccggaacgggctgccatcttcgccttcagcaatgaccctgtcgttgtcaggcaactcgccctggcgcgtgacgtaaccgcctttgaatcccccttcctgaaagacccggcccgcatgatttccaccgccctggacctgctgaaggaaaaagggctgatctcctccggccagcctgtcgtcatccagggggacagcctgcaaggggaactgctggcggattccattatcttcatgcgcgtggaataatggcctgcacctttcctatagagcgggagacggccgtgtggcccccgtccgcccccctcagggaactcctgctggatgcggatccggacgaacgccggatagcggatcacctggcccacggcgaactttacgtcgcaaaaaactgcgggactgccgccggagtcattgttatccgtcagacgggggaacatacatgggaaatcatgaattgctccgtagctcctgaatatagaaggcagcgttgcggaacagccctggtgcggcacgccctggacatcatcagaaacaaagggggccggtatgcggaagtgggaacgtccgatgcgtctccggggccaatggccctgtatgaaagctgcggattccaggtctatggcgttatcaacaaccacttcacggacaactatccggaacccgtctgggacaacggcgtgcaatgtattgacatgatccgcatgcgtgcggacctctcccttcagaaagaaggagcgcatcatactgctcagaaagcataaaccacgctgactcccgtcacccagctattgccctttaccagcgttcttccatacacgcggttcaccccgtgggaacccttgccgagccagtgcaggccaacaaaaggctctataaaaacattcccgaacagacggtaattcgccgtcaccctgaaatagagggactgccagccattgctgctggaaggccaataggaagaactcaacacggcaccgaatttaaaccccatataaaggttttccgtcatccggaaatccgatcccgtgcacatgtcaaaccaccagcccgtgattccgtaaaaggaatatgcggcacttccctgcgcataaaaaccggggaggaatcccacatcatggcgcataatcagtgccgcttcatacgttgtccccccattgccgaacaaacgttcggaagcaaaccccgccaatccgccgtcattcgcacgaaaggataatgccgcatacgtagcttttccgaacttccgctgaagaccaagatccaccatcgtctcattctctatatcaaccgccggatgccccagaaagatctcctccttcagagccagaatcagggaataccggtcattcaaatcgcttctccaatccagccgcaaaggagccgtgggattacagcccgcgggaatcagccccctgaactcgtaattagtggaatacccggctttgatactgccgctgaccggtcttaaagcaggagcggaaggaacctccggaatgcgtgattccgccgaagaaacggccatgaaagcgacggaggccatgcccgctccaaggagaaaagaaaaaaagaaattcataacatcggaatgccgtacggaaagtattctggataaaaaaactcctcttggcaacaagcaaaaacgccgctgtttcctgcgctgcttcaggaaacatcattcaggtctgcccgctgccaacttcagaaaaaataaacgagaccagccccggccactactccgaaattcttataaggcttgtcgcccctgtccgaacctcggttggccttcaaggtgccctctccggcccagttgaagctgacgaagggaacgagagacaggttcttggcacccagcttcaccggaagttcagccttcagccaccatgcctgggaaccgttggacataaaaagggatttattgtcaaaataagaggaagtggcagacatcccggcgctcaatacaaaatcggcgttggagcagatagcagcctgataccccacatgcggccggaaccaccagccggtcatgccctggaaggcatagctcatggttacgccagcaaaccagtttccgggcaaaccgtaatccagcgtcagataaaattcctgaatgacggaatgggcattccttctatacacatcttcatcactcatccaggtggtgttataatcatacctggcaaaattcccaagcaggccgccgtgaatcaggttccagccaagcgtcgtggacaggttcttcagtaaaccgtcccggtttttccatccaaaaagaaaatcggtctcgttatgaaaagagaaatctctttcccctgccatgtggtgtcctgaaatcaggaacgtataagacgccgccccaacaacggaattacaatcatccagtttataattcaaatccacactggcaggaataattccatctccttccgtcagtgaatgagaagccacaatgccgcggcaggtgtaattggaagcatacccggcattaacttccccggacaaaggacagtcctgttccacgggaacagaaaccggagaaacagttttaacggaaattcccgcaaaagcggcagcggaaagaaaaacggcaccccccgcaataccaatgatatttctgaattgcatcatcacgcttcaaatgaaaatttggatatcggcgcattgcaaaaaacggagttcataaaaaacaatgcgccgccagcaattaaaaaaagcgcggcggatttctccgccgcacctgaaaatataattcaatcgcaggccggatggcttagaaagaatagacaaggctggctccagccactacgccgaagttcttgtaaggcttgtctcccttatccaggcccttattgaccttcaatgcgccacagccggcccagttgaagctgacgaagggaacaagggacagattcttcactcccagcttcaccggaagttcagctttcacccaccaggcctgagcgccattggcctgctcgaacgcagcgccaaaatagctggacgtggcagacatcccggccgtcacgacaatgtccgtgacggggcagagggcggccttgtagccaacataaggttggaaccaccagccggtcatgccctggaaggcatagctcgtggttacgccggcaaaccagttctgagtcagatcgtaattcagattcaggtaaaattcctgcgtgacggaatgagcatggtcatacttggcaaagctgcccagcaaaccgccgtgaatcaggttccagccaagcgtcgtggacaggttcttcagcaaaccgtccttattctgccagccaaggttgaaattggtctcattgtggaaggaagtatccctgtcccccatgagatggtggcctgaagtcaaggtcgtataagaagcggaagccacgatggagttggcatcgcacagcttgtaattcagattgacaccggcggggatgacgctatccccttccgccaacgcgtgggaagccacaatgccgcggcaggtgtaattggaagcgtagccggcgtaaatatcgccggacagcgggctggaagtcgccacaggagcgggaaccggagtcggagcaacaatcttgacgggagtacccgcaagagcagctccggcaaaggatgccacaactgccgcaacactgatgatgttcttggtttgcatgactattacttggttagggtattaattgttgatttgctaacatggaaagaaaaatgctttttccccccttgttaagaaaagtgaaacattttcgtcacaaaagtaaagaattttctcttgataaatcagcaagtcattgatttcacattatttacatccaccagccccatgacaaaaaatccaattctccatatcttgccaaaccttcccttccaaggcctggccggatacagacactccgcaccatccagaagcctgtcttctttcagggcaggagaaggattcaccagaaccctccgcctgcaggaaagcagcatgggcagatccgcggcactgtcgctgtaggcaacggcgttttccagaacaccatgttccggcagtacattccgctcccgcagacgctccaccttcaccgcccccttattattaccgttcggcagttccggcattgccggcatgcgttcctccagaagcacatccgtccccagaacttcgtcaaatcccagcagttcgcccagaggcttcacgtaaaatgatggagaagcggaaaccatgaggcacaaataacccttcttccgataccctgccagccgctccttcagctccggataaatccattcctgcgccatctcggcaaacttccgtccatattcccgcaccgtttcagcgggaagcccccacaaatacatgagataagccctcttcatccggttctcatcccatattctcaaaatatagagcggaatacaggccaggaaaagaaaaatcagcaagcgcctccaagggtggcgcctcaccacaaaacaggaaaaaacatattgcgtatcccagggaaggagcgtgccgtccatatcaaacagcgctgcgcctctttttttccaatcgtccgtcatgctttcatcctatacccgcttcccttaactctcaacacccaactcttccatgcccctcctcctgaatgcccaaaaccccggccgccgaaaggcaaccggggttttgaagcaaatccagaaggaaataagattaacgggagtaaaattccacgatgagctgctcgttgacgatgggagcaatctcttccttggaaggcacgcgggcaatcttgcccgtgagcttgtcacggtcgcattccagccagtcaggaaccacagtagcctgagtcaggtcaaggaaacgggtaaccagctgctgggaagaagccttgccgcctacggcaatgacgtcgcccggacggcaggagtaggacgcgatattcgtcttcttgccgttcacggtgatgtgaccgtgggaaacaagctgacgggcgccggcacgggtattgctgaagccgaggcggtacacaacattgtccagacgaagctcaaggagctgaagcagaatatcgccggtaatgccgcggcggcgggcggcttctgcataatacttgcggaactggccttcaagcacaccgtactggaaacgcagtttttgtttttcagcaagcatcacgccatagtcggatttcttcttgcggccggcgcgcatgccatgctggccgggagggaaggggcgcttttcaagagccttggtggaaccgaaaagggcaacgccaaaacggcgggacactttatcgcggggaccggtataacgagccatgatatattagatctatataggtaaaagattctcaattagacgcggcgggccttcggaggacggcagccgttgtgggggatgggggtcacgtccttgatggaggtgatttcaataccgatcgtctgcacggcacgtacggcggattcacgaccggaaccgggcccctttacgcgcacttccacttcacgcaagccgtgacccatggcctggcggcaggcgtcctggcacaccacctgcccggcataggccgtgctcttgcgggaacccttaaagcccatcttgccggcggaggatcagccgatgacattgccgcgctggtcagtcacagttacgacggtgttattgaacgtggaggaaacgtgaaccacgcccgtggaaacgtttttgctgcccttggccttcaggattttgggcttgtcatcatcgccgcccagaccaagttccgcaaagatatccttgcggggttcgggcttcttgatttcttcaggagcggaaacagcggcggccggagtttcagcgacgggagcggaagctgccgcttccacaggctgttcggcggtttcgttggtgatttcttcgctagccatagtaaagctatattaaaaattcaggttggcggattacttcttcttggcctgcgcgccaacggtcttcttcttgcctttacgggtacgggcattcgtgcgggtacgctgaccgcgtaccggaaggccgcggcggtggcgctgaccacgatagcagttgatggaggtcagacgcttgagaatggattgcttttcacgacgaaggtcaccttcaatcaaaatgccgtcggtggtgattacttgaacaatcttcgtgagctgttcgtcggtaagctgtcccgtgcggatgtcgggattgatgcctgcttgttccaggattctcttagaagtcgagcgaccaattccgtaaatatacggaagggaagcctcgatgcgcttctcgttgggtatttctgtaccgaaaaggcgtgccataatggattggatttgctagctgttatttttctctgcctcgcgcagagctattgcttggggcaagatggataccataaattgaggttttgacaagaccaaaacatcattttttctatttttaatctcttgcaccgcttgaagatgcatgccgcccgtggcggcggaggatgcgctccacagcccaggaagcgtgttcctccaccagaggagactccccgtaaagcgccttcagaaaatcaatgtcatccggagtccccgcattccccagcacaacgcagccgttacgcagcagcccttccctcttgagccttttcaacggggaatcccggaacagggccgcaaaaccgccggcatccagggaaagaagaccacgcaggggaatggaagccagcagacgggacatgcggaaccgttcgtcaacgtccggcaaaggcttaccattccagggacagaccgtcacgcaggtatcgcacccgtacaggcgcgtgcctatcaggggacggatttcttccggaatagccccccggtgttcaatcgtccagtaggaaaggcagcgtccggcatcaacctgaccgttttccataattgcgcccgtcggacacagggccgcacaacggcggcaactgccgcatccgtttgaaaccggagcgtccggttccagttccagcgtagtcagcagggtagcgataaaaaagcgggagccccctttcctgcgcacgatcaaaccgcttttcccgcgccagcccaggccgcaggcctccgcatggtcccgttccataacagggccggagtccacataccccctctgcttcccgccgtaaatggaaagcagctcctgcaaatccgccagtttttcctccagaattccgtggtaatcctttccatgggcgtaaaggcaaatgctaccctccccctccgggcgcctaccggggctgtcataatcataggacaggcaaatgacggaacggcatccgggaagcacttccgcaggatccgtgcgccgctccggggaacgcgccatccactccatcccggcgtgccatccgcgctccagccattgaaacaatttttccgcatgcgggcttttttccgcacgggccacccggcagccggaaaaaccaagctgccgggacacggcgcacaaggaatctttaataacagaggaatccggagtcagcacgccggaatcatgaacaagagcatgcctcccaccaagaattttcttctgtccggtggaaattggattgcctgcaccccgccgccgcttcataatgccgcatatatgaacatccggattctgagcgatgggaaacagggccacctcaaccagtccctggggctggcgcaggctctgatctccaaagcggggggaaccgtggaaacggtagacctgcaggggctttcccttttggggaaaatccggaaggtcgtcacaggcagcgacattccacggccggatctgttcatttccgccggacatgcaacgcatatcccgctcatctgcgcgcggcaccatttcaaaacccgggccgtcctctgcatgaagcctacgcttccctgttcctttttcgacctctgccttattccccgccatgacctggattccggccgcgattacacggatacggatatcttccccacccagggagctctccaccccatgaggccggatccctccgtaccaaaggataccacactgattctcataggagggcccagcaaagattttgactgggatgacgaaagcatgctcaaccagctcgcgtccatcagcatccacacccccggacaccttgttctaaccacctcgcgccggacgccggacggctttgcggaaaaaatccggacggccgttccggaactaaccgtcgttctcgtggaggaaacccggccggggtgggtagcccggcatctggcgcacgcctccgccgcctgggtcagccaggacagcgtctccatggtatatgaggctcttggctccggcgcgcctgtaggcatcctttccgtaccgcgccgacacggcagccgcaaatcccgcatcctgtccggcctggagacactggaaaaggaaggcatggttactggatacagtgactggaaaaaacagaacttccgcctgacggctcccggttccccgcttctggaagcggaccgtgcagcagactacatcctctccagatttttccctcagctccgcgccttatgaaaatagtacatctcgtcccctccatggaatccggaggcgtggaacaagtcgttatggaactgggcagcggcctttcttcccggggcgtggaaaatatcgtcgtttccggaggcggacgcctggtgccccgtctggaaaaggaaggctcccgccacatcctgatgccgataggcaaaaaaagcatctccactctcttccgcatcgggaccctccgcgccctgcttcaggccgtcaggccggatatcctgcatctccattcccgcgttcctgcgtgggcaggctacctggcatggaaaaagctcccgcccgaagaccgtcccggcctcgtcaccagcgttcacggcttctactccgtcaaccggtactccgccatcatgagccggggagagagggtgatcgccgtctccaactgcatcagggactacatccttgaccattatccgtccacccctccggaccatatcagaatcatacccaatgctatttccccggatcaatatcatccggcctactccccctcccgggaatggctcacgggctggttcatgtcctatcctgaactgaaggggaaattcaccctgtgcctgccgggccgcatcacgcgcctgaaagggcatctggatctgattccggtcgtcaggcagcttctggaacaggggatcccggcccacgccgtcattgtaggagaagcaaagaagggaaaagaagaatataaaaacgaggtcctgcgggcaatagaacgttccggcgtctcccagtccttcacctggacaggacatcgccaggatctgagggaaatcctttccacatgttccgtcaccctctccctgaccaaaagcccggaagctttcggcaaatcaaccctggaggcgctcgccctgggcaaacccgtggccggatacgcccacggcggagtcaaggaacagctggacgccttccttcctgaagggaacatcgccgtaggagataccgccgccatggcggatctgctggcccgctggcatgcccagcccccccccctgccccggcaaattccttccccttacaatatgcaggatatgattcaagcccatctggacgtttaccaggaactgaccccttattcatgacaccccgggaagcagccatagccctgaacctgataccgggcctgggccctgtcagaatcatgcgtctcctgcaggtattcgcctctccggaactgattctggaatccccttcctccctgttgatggaaattcccggcgtgggggtgcagctggcttgccgcatttcctcttggcggagcatcgtcaacccgtacagggaactggaactggcggataacgcgggggccgcagtaaccacggtttttgacgactcctacccatcctccctgcgtgctctcccagacccgcccattgtcctctactcctggggaaactggaacggaacggatgccgaacgctccattgccgtcgtcggctcacggatggccacccattacggcaggctttgcgccagaaacatctcccatgacctggcggaagccggagtcaccgtcatttccggactggcgcgcggcgtggacacggaagcccataccggggccatggacgcggaggggcgcaccatcgccgttatcggggcaggtctcaacaaactgtatcctcgggaaaacagaaacttggcgcagcgcattgcggacgggcatggagcggtagtctccgagttcccaatggacctgtccccctcccgcaccacttttcccatgcgcaaccgcatcgtgagcggctggagccgcgccacactggtggtggaggcgtccggacgcagcggggccctgatcacggcccgaacggcgtccgaacagggccgagaggttttctgcattcccggaccggttgaccggcattcttccgacggatgccatgccctcatccgggacggagccatcctggctaccggagcctccgatattctgcaggacatgaactgggccgttccggaacagggactgcctctcttctcgccatgtcccccttccggagcctcaaccccaccgcttcccactttggaagaaaaggagattctccacgccatcagactgggtttcaatactattgacaccctctgcacctctctgggaaaaacggcgcataccatcaccccgcttttggccaaaatgcaaattgcagggcaaattactccggacgccggagggtatttctccattaacagcagggaactttaggcagattccgctttgccgccggggaaaacgccagatccgggcctcctctccctgaccatggaaccggaagggagcgccgtccatctcccgtataaaaacctttccatccggatgcaaaaaaacgtctcaaaatagtcgccaaatcctttccttcaataattatattccaaaaattaaatatatcggcaggacatccccggcattttaaatgcctgcggcaagatttacatgcccgcgaaaaacaaaatatgttcggaaaaaatctctgcaatatttactggacgcaggatcgggctcatacggcaacatctcttaaaaagaactgttgacgaacatattttgaacgcatccctccttccagtagtctcatcctccacaagatctgtccgacggatggaaaaagcaattcaaaatccgtttagggtggtttttggttccataggtagttaatagagaaaaaaggccgcggattgtccgatccgcggcctttttcgtccggctctctttcaaatgcggagtttgggcttgatgaacgaaacttcttactgtagcaacaagacatgcgtttattcgcccttcttgcaggattctccctttgcctgagctccacaagctgccaatcgtacggggattcaagtgactacatcccccttgcaacgcccgttcccccacaactctcccagccggtttcccatgccctcccccgaccggccaatttccccacacgtcccgtagccatcccctcaagcgccccacgcacgccccgctgcgccagcgcctgcgtcatggacgcccttaccggcaaagtgctcttttcccacaacggcctccagcaccgccaggtagccagcacgcagaaactcgtgacggccatggtcgtgatggaacacggcagcctggacaaaaaagtggtcatccagccttccgataccaaggcggaccccaccaaactgggattccgggcgggggaagtctattcacgccgcgaactgctcaatgccatgatgatccgcagtttcaacgacgtagccctggctctggcccgcgatacggcgggttccgttccccgtttcgcccagttgatgaatgccaaagcccggcagatgggcatgtacaactcacgcttcgccaatcccaacggcctcccggcggatcaatattccacggccattgacatggcccgctgcgcctattacgtgtaccgcaacccggaactgcgcaatattatctgcaaacgccaatatgcctttacccgcgccaacggcagaacgcttctgctgagaaacaccaacaagctgctcacccagaacccctgggttaccgggatgaaaaccggatacacgaacgccgccggacgctgcctggtttcctcagccggcgtcaacgggcgccatgtcatcgtcgtcgtcctcggctgccatccgtcccgtatctggacggaatcggaaaacctgatcagatgggctctgggatccgccgcataaatgcccgtcggcaattggtatttgactttcacggcgtgacccgctatcagtcctgcctatgttacaggcaggtattgtaggtctccccaacgtcggcaaatccactctattcaatgcggtcacccggacgcgcaaggcccaggcggccaactatcccttctgcaccattgacccgaacgtgggtatggtaacagtcccggatccccgcctgcaggttctttccgacatgtccggttctgaaaaaatcatccccacgcttattgaattcgtggatattgccggtctggtcaagggagcctcggaaggagccggcctgggcaaccagtttctggcgaacatccgtgaagtggacgccatcgtgcaggtagtccgctgctttgacaatgatgatattatccatgaactcggttccgtggatcctctgcgcgacattgacatcatcaactcggaactcattctggcggatatcgccaccatggaaaagagactctcttcccgcgaacgcaaggcacgcagcggcgacaaggaagccaaggccgaagtggccctcatcaccaaactcctgccccacctgaacgaaggcaatcccgccctcacccttgaaccgcagctggacgacgacgaacgcaagctgctccattccttccagctgctttcggataaaaaaagcattttcgcctgcaatgtcaatgaagacgaactggcggacgccatctccaacccggacgcccatccctacgtctcccaggtgaaaaaatacgtagcggaacaccataacgcggaagccattgtcatctccgcccggattgaagaggaactcatcgacgtctcggaggaagaatcccgcgaattcctggaatccctgggtgtgaaggactccggcgtttccgaccttatccgcgccgtgtaccaccttctgggcctgcgcacctacctcaccacgggaatcaaggaaacgcgggcctggaccattccggccggggcaaaagcaccccaggcggccggcgtcatccacacggactttgaacgcggttttatcgccgcggaggtagtgcactacgacgacttggtttcctgcggcggcaaggccggagcgagggaacacggcaagctgcgcatcgaaggaaaagaatatgtcgtcaaagacggggacgtcatcgaattccgcttcaatgtctagacggaagcgttaccggaattccattgacttttactgatataaggggcagattgctcataaccttcacatcgcctcatgactgatacagacgtcaaatccacccccctggcagctaaacacgttgaactgggagccagaatggttcctttcgccggctggaatatgccggtgcagtacaccggcattctggacgaacacaaagcagtgcgcgaaacctgcggcatctttgacatctcccacatggggcagttcacggtagccggcggttccgctgcggcatggctgaactccatgctgaccaatgacattaacaaactgaatgtagggcaggggcaatactccgtcatgctcaatgacagggccggagtcattgacgacctcattctgtaccggatggaaccggaaaccttcttcgtagtggtgaacgcctccaagattgatgaagacttcgcatggctttccgcccatcaacctgcaggcgtaaccctggaaaaccactccgacgaatacgtggggctggctgttcaaggtcccgaatgcggagaagtattctcccgcgtcatccccggcgtggaacttcccccccgcaatggaatctcccgcatcacggcggaagggacggatctcattatctgccgcaccggctataccggggaagatggttttgaattcttctgcccggctaaggaaggcgtcaaatggtttgaagcctttcttggagcaggagccaaaccctgcggcctgggcgcccgcgacagcctgcgtctggaaatgtgctatcctctgaacggctccgacctctctccggacaaaacgcctctggaagcagggctcggattcttctgcgcgctggatacggacttcatcggttccgatattctccgggaacaaaaagccaacggcctcagccgtcggctggccgctattgaatacaccggcaagggagctcctccccgcgcccactatgccgtgcacgtccctggcggagaagccatcggagaacttaccagcggcgtgctctctccttcgctgatgaagggcattgccctggcctacctgcctgccgcccatgccaaggtcggcacggagctggaaattgacgtaaggggaaggaaattcccagccgtggtcgtaaaaaaacccttttataaaaaaggctgacactacggcgcaaaaataaactgacaaacaccttattttactacactctcacttcaaacaattacatcttatgcacgacgtaccagaaaatctgctgtattccaaagatcacgaatggattgaaattgacggggacatcggcaccatcggcatttccgaccatgcccaggccgaactctccgatgtcgtctttgtagaccttcccgaagtaggcgccaccgtcgcagctggcgaccctgtcgctgtcgtggaatctgtcaaagccgccagcgacgtgtacacccccgtttcaggagaaatcctggaagtgaacgaagagctttccaatgatccgtccctcattaactccgacccctacggcgcaggctggctgtacaaaatccgcctggacgttcccacggaaacggaagatatgatgaacgccacggattacgaggaatactgctcctgaaccattcttccctcccccgccccggtgattccatcccggggcattttgtttggcccgttccgcggccggacgctattaccagccagagataccacatgaatacccactcagattttgccagccggcacatcggcccccagggggaagaacgccgggaaatgcttgacagcctcggctaccggacgcttgacgaactcattgcggacatcgtccccgcagatatccgcataaaggccccgctggacctgcccgcagccaaatcggaaacggaagccctggaggaactccgttccatcctgcggaaaaacaagctcctgaaaaccttcatcggccagggctattacggcaccatcactccctccgtcatcctccgcaatgtactggagaaccccggctggtacacggcctacaccccttatcaaccggaaatcgcccagggacggctggaaatgctcatgaatttccagaccatggtctcttccctgacagggctgccggtagcgaacgcctccctgctggatgaaggcaccgcagcagcagaagccgtcaccatgtgccggaacgcgcgccccaaagcaaacaccttctttgtggcggacacctgccacccccagaccatcagcgtcatccgtacccgcgccgccttccagggcgttaacatcatcgtgggagattgctcctcctttgaccccgcatccatcggtgcggatctggccggagtgcttgtccaatatccggacacgctcggccgcatctgcgactacacggacttctttgcccgcgtgcatgccacgggcgcgctctgcgtcgtagcggcggatctcatggcccttaccgtcatccgggaacccggcgccttcggaaccgatatctgcatcggaaacacgcagcgcttcggcatcccaatgggcttcggcggcccccatgccgcctacatgtcctgcacggacgctctcaaacgccgcatgcccggccgccttatcggcatgtccatagataccctggggcgcccggcctaccgcctggccctgcaaacgagggaacagcatattcgccgcgacaaggcgacctccaacatctgcaccgcccaggtgctcctggccgtgcttgccgccttttacgccgtataccacggccaggaaggcctcaaacgcatcggcacggaaatccacttgaaaaccaaaagcctgtacaaggcgctcacggaagccggcatcgccattgaaaacaaaaacttctttgacaccctgctgctgtccgttcccggacaagcggacgccatggtgcaaaaagccctggaagccgggtataacatccgcagggtggatgccgaccacgcagccatctctctggatgaaaccgcaacctgtgcggatatagcggcactggcctctgcccttgcaggtgcggaaacatccgccacctgcgattgcgacgctcctgcctgggatcccgtccacacgcgccagacgcctttctgcacggaaaaggctttcaactcctatcattccgaaacggaaatgatgcgctacatccgccgcctggaatcccgggacctggctctaaatgaagccatgatccctctgggctcctgcacgatgaagctgaacgccgcctctgaaatgattcccatcacgtggccggaagccaactccctgcatccctttgttccggcggaccagtcggaaggcatccgggaaatgctctccgtcctgtccgaccgtctggcgaaaatcaccggctttgccgccgtatccctccagcccaacgcgggcgccgcaggggaatatgccgggctactggccatccgccgctaccagaagcacgccggagaaggccaccgcaatgtctgcctcattcccacctccgcccacggaacaaatcccgcatcctccgccatggccggcctcaaggtggtgcccgtcaaatgcgacgaaagaggcaacatcgacatggcagacctgaaatcccaggcggaagcccataaggacaatctttcctgcatcatggtcacgtacccctccacgcacggggtatatgaacagacaatcaaggaactctgcgacatcgtccatgccaatggcggccaggtgtacatggacggcgccaacatgaatgcccaggtaggtctgacttgccccggctgcattggcgcggacgtctgccacctgaacctgcataaaacctttgccatgccgcacggcggcggcggtcccggcatcgggcccatcggcgtagcggaacacctcgtacccttcctgcccggacacctcacgctgggccatgaagaaggggccgtagcgtctgcggcgtggggaagcgcctccatcgccgccatctgctggatgtacctctccatgatggggccggacggcctcagggaagccacggaaatggccatccttaacgccaactacattgccaagaaactcggacatctcttcccggttctctactccggcaacaaggggctggtggcgcatgaatgcattctggatccgcgtcagctcactcatgacgccggcctcacggtggatgacattgccaaaaggctcatggactacggcttccacggccccaccatgtccttccccgttccgggcaccctgatggtggagccgacggaatcggaacccaaaaaagaactggaccgcttcattgaagccatggaacgcattcatgcggaaatcacggccattatcaacggtacggcagacaaggaagacaacgtcctgaaaaactcgccccataccgcagaaatggtctctgccgacgaatggcggcatccctactcccgcagtgaagcggcttatccggtctccggtctccttattcacaaattctggccgtatgtaggccgggtggataatgtgtacggagaccgcaatctggtctgcacctgcgacacggtggaggaattctccaaggccgtagagttataaaaatctcatccttcctttcaaaaaggctgttccattcatttggagcagcctttttcttatgttcaagaatcggatttccaatccgaagtcaacactctattttgagtacaaatgggtcatcaaaatgaaaggggaggaaaagcggggtgggagaaatgttccttttttctttttcaacccatattgcttttgggcttaattgttttctggatatgtttgctctttcggattggaaatccgttgagctacgtctcagatgagctttttctctgcccttactgttcctggccttcaacagcatctttctttttccagggaagattccgctatcctcaaagggtatggaattctcttcatgatctttcatcatgtcttcggcttatacgctctgcccgcaggtgtggatacggcatggattgctccccagcttaccaaagccgctcccatctttaaaatttgcgtgcccatttttatttttatcacggggtacgctatgggatggaaaacaaattcatccccaaccttcggctccctcattaaaacaggcttttcccattactttaaattctggaaaatttatttcttatgcctccttctggctattctggtttcctgggcattccctttgcccatcttgccatccgttgccgacatggattggaaaaatggcctgcttgtcgtaacaggattgaggccctgttatccagactggtggtacatggctcttttcgcggcagccaccatggccctttatccaatctgtgcgtggatcacgcatcacattgcgcctgtcccgtccatggcagctctgctgggagtatcccttttacttcaaagtacggcccacattccctggctgccgggaatcgcctcatccttccctcctttcctgccctgcttcattctcggctacatgtgcgcctttctggcttcacgcctctctgctctttcaacttcccacagcttgggggcaatcctgttgctggctcttgaaatactatccatccatctcttcagtttttcaaaagccaaaaccctgacggttatctttctcttcaccctctggtgtctgccttggataacccggaaactccgcctcacaccgctcttgacgctgctgggaacttattccgcacttatgtggctgaatcacagattcattttcggctaccacttcagctgggacctctatggggcccaaagcatcagcgtagtattcatcgtgacgctggtctcctcccttctgctggccatggccatgcaaaaactttttaaccggatgattccctcaaatccgcaaacgcagtcaaaaactttgtagcaactttacaaagtccgggttccaacaccgcttaattccacgggggatctccgtacttattctctccaatccggctttccccatgggataaataccacaacagcagccaccctatgaagggaacggccagaaaaaccaggaaaaagccgctcctcccgacatcatgcagacgccggactatggtagccgccagcggaatagacagcacggcaagcaccacgtacagcagaggggaaaccagctcaacccacggaaccagggacgggaacaaaccgcattccgcaaaagaggggactaccgccacggccagccacgcaacccccactctggaaaaaacctcgtgcagctcccctttcccggcacggccctcaaaacggcaccatgccttgatgacgcgcatccagtacttcttcctgctccagccggagtcggcgcctccaggctccggtccggtatccggcagaatggagggatccccatcatcatccatgacagtcatggcggggataaaagaggccagaggcctccagtctccgccgggaaccttccggaccaaagtccggttggacaggcggccgaggttacgggcccgcagcaaaagcaccaggtcaaccgggcctttggaagaaccgtcaattgcctggtactcgtacagatcgctcatagggacgcttacctggattccttcccgtggctgaaggcggaggcgggaatctcctgcttgggcaaaccggggccttcccacttcaaaaccagtttggaggcagtaccggagttccccacatagccgatgcggatgggatgaagtccggctttcaaataaacgggattcttccggtcacccagatcggaggagacctcggcccccggctcataagttttgtccgcgtcaatcaattccatgccgtgcagacggacaaaagccttgctgcccttattttcatccgtggtcagataaaacgtatatgctccgtcctctggaatcttcacatatcccgtcagctccacaccgcgcttgtccgaaccgttcattttcacggatggggaaggcgtcacgccatgggcggaagcaggcttcttccactggcggaaatccggtacccagggaaaatccccctcatacaaggcccatcgcaacccgggagaaacggttcccttcacatccacggcaggcaccagcgcagaatcaaacactgttttggaaggaagggaagcccggcgattggacaaagcggcggctttcatgcgggcctgaagttccggcttggaggatgcgagatctttgctttcttgcggatcattcaaagtatcaaaaatcatgaaatccttgtccgcatccttcacccccatgcgcaggcctttcaatccatccacaaaaacaatctgctgctggcctcgctgcgctcccttgtgttcgcccaggaaatccttatactccggcgttttgccggcgaaattatattcggcataaacaatgccgggcttctgctggtccgcatgaccggtcagcgtcggcagcagggaaacgccgtcactgcgggctggaaccggcatcccggcgacatccgccagcgtagccagccagtcatggaactgtccaggatgcaggctgatctgccctttgggtatgcgggcgggccagcgtaccagcgtaggcacgcgcatgcctccttcccagcaatcgcgcttaataccgtccatcatgccataactcttgaaaaactgcggattttgcgctccgtgccagtgcctggagtcggagccaccctcattgtgggggccattgtcggacgtgaaaacgatcatcgtattatcgtcaatcttcaaatctttcagcagacggatcaaatcagccacggcatcgtccacgcggcggatcatggtggaatgacgtttggccacatcattcgggaaacgggaattgtccggatgaatataggtatccttattcttttccgccttggcgtcaaaagccgtattcacggattccgtgccttccttctttacccattgcaggcctcctttcaatccgccgccggaaggatagggaacccccggaaccaccagattgccgtggggcgccggaaaagccaggtacaggaaaaacggctttccggtcttgcggacggacttgcgctggtgcacaatccactgcttggcgcgggcggcaaataaatccgtggaataagccgtctggggcacctggtccttgatatttttccactcgggattggaagcgtaaccgttgtattcgaaaacgtcacgggattcggaaggatagtgaaaatgccctgccaaatggtccaggataccgtaaaaataattgaatccccgctgatgggggccggcggtcatgggcacatggctctggcctccgccgcctacaccccatttgccaatggcagcagtatcatacccggcatcacgcatcacggtacccagcgtatgggaatcttcaataggctggtcgaaacggttgtttctcaccacgcgggaattcccctggtgcacccccagcagcagggaggcgcgcgccggagcgcaaaccggagcggcggaataatgacggcgcagctgaatcccctcccgagccagagcggacagggcaggagtcttgaactcgttctttctctccaccgtccggccattcagcttctgctggctccagttggaatccagatcaccccagcccatgtcgtccaccagaatgaaaataacattgggttttgaagttttgacagaccgggcagccggcttcgttgcctgcccggaagcacccatgcacggaaccagggaagtcagaagaacggatagtaaagataccagcttcatgattcaaagaaaatagactctaaaaaagacgttaaaataaagcgttatcttacatgaattttctcatccctcaagaaaattacgaggaaagggcacagaggattgaatcgccagtattatcggcaaaaaacatcagggaaccagccttcacagccggaacaactacaacccgccatactgcaccaatgagcggcttttctggctgaagccatgaatgggagaaaattcctcctgcattcccggcgccccggtcaccagccccgcccggccatgctttatcctgaataaaacggcagtccccccgccgggcagaaaatacagaaaccggcggaaacagcaatcatgaaccggaacgttccaaaatgtccgcgccaattccggaacagcgttaataaccctgtccggaatagcgaaggcatcagaaacgcttcttcctgtcgtccctgcgggaacgttcgccccagcgttcgccgcggtcactgcggaagcccccgcggtttcccctgaatccgctccggtcactgcggtcccgctctccgcggtaactgttgcggaatcctccattgcggcgggaagagcgcggagttccggaatattccggagcccccttgtcttcacggacattaacttcatagccgcagacggtagccgtcgccagggcctccagaagcaggggcgccacggaagcgtccacttctatcagggaatgcttggggaaaatccggatatcgcccacggctcccttttccatttccaccgtattgtaaaataacccggctatgtctttgggccgcaagccaatcatccggcctccattcataaacagcgtaaccgtatcccccttatgctgccaggaatcacccttctgcgggctctccgcctcctccccggtctgcggcatacgccgcgccctgcgggcgggcttgtcttccggaatgggctgcacttcccggtgcgtacgttcccggagcaagtcaaacagggccgcagccatggcctccggcgcagcctccacttccttcaattcctccggcagcacggcatccggcttgagacgttccaggatatcatccaccagggactctgtccggagctgatccacctgaacggcagtcaacacaggttccggagtcaacttaacgccgatgaaacgttcaatgcggctcatcagggaaaaatcacggcgccccacaaaagtgatggccttccccttgcggccggcgcgtgccgtgcggccgatgcggtgcacgtaatcctccggatcacgcggcaattcaaaattcaccacggcatccacatcgtccacatccaggccgcgggcggcaatatccgtcgccaccagaaggcgcaggctccccttgcggaaggaatccatcacgcgctccctcatcatctggggcatatccccatgaaggcgatccaccggataaccgcgggccgtcagaccgtccaccacgtcatccaccacctttttggtattggcaaacaccagccccattttaatctttccggtgtcaagcagccggctgagtacctcaatccgggaggaaaacaccacttcgtaataaacctgttcaatggtaggcaccgtcagcgtaggccgttcaatggaaatctggacgggctccttcatgaacctgctcaccaggcggctgatttccggagacatggtagcggagaaaaacagggtctgcttcgcttccggcatagcgtccgcgatatgttcgatatcttccagaaaccccatatccagcatctcgtccgcttcatccagaatcaacatgcggagaccatccagccttagcgccccggactccatcagatccatgacgcgtccgggcgttcccaccacaaactgtaccccgcgcctcagggcgtccagttgcggacggaaagaagagcctccgtaaatggggacggcggaaacaccgtccatgaacaaagccagcttgtccacctcccggcaaatctgaacggccagttcccgagtaggacagagggccagcacctgaacgcagcgttcctcaggatcaatgcactccagggccggaatggcaaaggcaagcgtcttcccggagcccgtatgggacaaccctacaatatcggcccctccgatcgcggcgggaatcgcctgctcctgaatggaggaaggggtatcgaagccgagcacttcgatagcctccagaatctccggtgaaataccaagagccgaaaaagaagatgtttgagtcatgggggaaaaatgatctgtcagagtcacgggagaagctgaacattattccctcccgtgtccagccaaaagaacggaagataccgtagatgccacgatttccgcaaagccgcctgcgaataaaaaaaacggctctccccgcttctggtctttactgtcacacacggggttgcaacttgcaggggcgcattcgcgtatgatacaaatatttccctccgaattcatggataaaacgccaaacaaatcacagtcctccctgctgggaattttcatcaacatcctcctcccggtactgattctggactactgcagcgcaggccccgccaatcccctggaacgtccggagggagaaagtttctggcacatcggcccggtatggtctctcgtcatcgccctttccctccccctcgtctacggcatccgttccctggccgtctccaggaaatttgacctgatgtccgtcgtaggcatggccggcgtgctgctgacgggcgtcatcagcatcttcgtcatcgggccggaagggcgcatccacagcgccacaccctggctgttcgccggaaaagaagccctgatccccctcatcctggcggcagccgtcgtcgtctcccgctccaccggcacccccctcctcaacatgttcatctacacgccggagttattcgacgtgcgcaggatagaacaaacggtggccgccaacggagaggaacaggcctaccagagcctgctggcaaactcgtcatggattctggcgggcacattggtcgcatcctccgtcggcaatttcttcctgagcctctctttcatgtcctccgtcatacgccagccggaagcggaacagcaagtggcctacaatgccgctatcggcagcatcacctggtggggcttcctgatcatcgggatccccattctggcagctcttgtcttcatcatgacccgcctgattaaacagctcggcaggctgaccgggctctcacgggacgaactccttctcaaataaacctcaaaccatgcgcctccatacttcatgcatcctggctgccgccatcgcccttaacgcagcgtgggcggacgccccccggttcgaccggattttcggttcccatatggtacttccccacgggaaaaacattcccgtttccggcacggccgcccccaacagggaaataaccgtcacttttggaaacactgctttgaaaacaaaaaccgattccaaaggaaaatggagcgtcacgctgcctcccatgcctccctgcggcacaggccagacgctggcggccgtgcaaaacggagactccgccaaattggaagatgtgctcgtgggagaagtgtggctggcttccggccaatccaacatgctgttccgcctgaaccagaccacgacggccaaagaagacatagcggcttccggagatgaccagctccgcctgctcaacaatattccgcaagcccacaccaacaacgccccctacttcgggaaagattttgacgccgtcaccacggacaacttctataaagggcaatgggccgccagctcaccctccacttcaggccccatgactgccgtgggctactatttcggaaaaaaactccgcgaagggctgggcattccggtaggcattatccactcctccctggggggctcggaaatcgcagcgtggctccccagggaagtcattaatgcaaacaacagtttccgcaccctgcgcggcaaccactggctggactccccccttatctccgactgggtaaggggacgggccagaaaaaatatctctccgcgtctaaatcagggatctccggaccatccctacaagccggcgttcctttacgaatccggcattgcctggacaacaccactccccatcacaggcgtgatctggtatcagggtgaatccgatgcggagatcattgacaacgcccaaaacggcatgttgctgaaaactatgatctcctcctggagaaaagctttccgcaacccggaaatgcccttcgtcatgatccagctcccccgcattaacgatccgtcaaaaatccgtgccggatggccggaattccgcgaaatgcaggacacagtggccaaaaccgtcccgcaggtttacagcgtcaacactattgatcttggctccaccaatgccgacgttcaccctccgttcaagcgccctgttggggaacgtgcaggaaatactgccctgaacaaggtttacggtaaaaaggtcccctgtgaaggccctgccttcaaggccttcaagacctccggttccagcatcctggtccagatggaacaagctgccggactgaccaccacggacggcaagaaaccggcccagtttgaaattgccgggacggacggaatttaccatcccgccacggcggaaatcacaaacaggaaaggcggcacagccgttatccgcctctcctccccggaagtaaaatcccccaaaaacgcccggtattgctggaaccgtttcgtgacccccaacctggtcaacggcaaccagctccccgcccgtcccttccggacggacgcacccgttctgaaaaaataactcttaccacgccatcattccatgaaccttcatcttttccttgcttccctggcagccacgctctcactgggcattgcggcacaagcttctcccgccaaagtggcctgcgtaggggacagcatcaccttcggctccggccttaaacccggagaagcccggtatccgcaagtgctcgccacgctaatgggcccggactttgacgtcagaggattcggcaatcccggaaaaacggcgggcgactatccgggccaggcaggacgctggtacggcagcaccagggaacacaagcaagccctggacttcaaggcggatatttatatctgcaaccttggcatcaacgacacgggccgatggtggaaccccgaactgttctccaaaggctatgaagcgctgctccaggcatggaaaaacgccaatcccaaagcacggttctttgcctggggcctgctggggccggactaccgcggcccgctcaacaaaaaggcattccccggcaactgctatccggacgtacgcaaatatgcaggctcggacaacggctccgccgccaaccgcccggaagcggaaaaactgattgccgccgtagcgcgcaagtacaaagtcagtctctttgatgcgctgcacccgctctccgaccatccggaatggtatgttgacgggctgcatcctacggaacagggcgcacggcgtattgcggaaatcaccttcgccaagctggcaaaaagcctcaagattaagcagcccgtccccaggctggaaccgggtaccggcaacgtgatcatcaacaaccccggtaattccggcattcttctggacggatggaaattgacggacggctccaatacgctcatttttgaaaactccaccgtcatccatcccaaggacaggcttatcatcgccattggcccggagacccaaaaagacccgaccaggcccctgcaaatcaaatccgccaaatcccccgcagctttccgcctcattcccgcaaaaaaatattaaaaaccactggaacagtttcattgggaacatacggaactgttgcatgttcccaaatacccggcgcactctattcccgccctcacgcaccggcggcaggcggcaagccgcggaactctgcggggcatccggattccccgcaaacgggatgcctgcgtccgggacagcttccccgctatcccggatgctccttttcatcctattttaattgagcatttctgcatccaaaacggtctaccgtgcatggaacagaataaaagcaaaccatccgcatgccgcctgcttggccccttggccaccaacaccagtatggatttcggcgttctgctgctacgtctgggagtagcagtcatgatgcttgtgcatggtatccccaaactgggcatgctcatcagcggaaactggtcggccttccaggatcccctgggaatcggcaattttctgtccctgctgctgtgcgtaggtgcggaattcggttgctccatcctcattttgcttgggttcctgacccgcctggcctcccttatcctggttattaacatgtgtgtggcgctctttcttgtccttggcctctccggctggggagcacaggaactagcggccatctacctgctgatctatctgaccctcttctatacgggaccgggcaaattctccctggatgcctggtggctctggcgcgactgcaagatagaagtggaatgaaaacagttcctcccgcgcgtcctatggcaaaaatacttcttttttcactcgccgcggaaggagccttcctctaggatgctggcacacccagtccatccgttcaatgtccggcaaactaacctacaagcaatcgggggtcgataccaaggaagcagccgcttttgtatccgacatcagctctcacgttaaaagaacgcaaaagcagagatctctgcaccaggcctttggccttttcgccgccgcctatgatttgagctcctacaaggaaccggtcatcgtcaccgggtgcgacggcgtaggcaccaagacggaaattctttttgaactggacatggtggaaaccgccggcaaagacctggtggccatgaacgtcaacgacattcttactacgggcggcgaccctctccttttcctggattatctgggcatctccaatctggaacgggaacgctcccgtatcacccgcctggtggccggcatgtgcgactacctggaatcctgcaactgcatcctggccggcggagaaacggcggaaatgcccggcgtggtgccggaatccatcgtggaactctccggcttctgcatcggctgctgtgaaaaaagcaaactgattgatccgaaaaccgtccagcccggagacgtattcatcggctacaaatccgacagcttccatgccaacggctggagcctcatccgccgcattctggaagaaaatccggatgtagttgatgaagaagaactccgttccctccttcagcccacccgtttgtatcatgacgtagtggaagatatgcgccgcttcaacgtcaccccgaaagcatacgcccacatcacggggggaggcctcccggaaaacctggaacgcttcctgggcgactacggcgcagacctctccattccctattgggacaacaccgccgcccagaaaatcctgaagcatgtggatactcaggaccgcttcaacacttttaacatgggcattggctgggtagccatcgtgaggcctgaagacgcggaagccgcattgaaggcaggtccgggcggcacggtcatcggcacgctgagagaaggccgcggcattcatgtcaaggtacagggcgaataaaaaacaccatctccttgcagcggatacaccacacttacaggacaatcttttcatcatcatcccatgagcgattttcttaaacacgagtgcggcgtagccgccattcgtctgcttaagcctctctcttattttcaggataaatacggctccaccctctgggcgttcaacaaactgctcatcctgatggaaaagcagtacaaccgcggccaggacggcgcgggcataggctgcgttaagctgaacatgcccttggggcagccttacctgttccgcacccgggacgccagcaaagacgccctcacgagcatcttcaacgggcaaatcaagaagctcaataaaaaagttcgccgcggccaagtcaatctgaaggatgcggcagatatcaaaaacaacttcgactacggcggggaaatcctgatggggcatctccgctacggcacctccggcctctttgacgaaggatcctgccacccctacctgcgccgcaccaactggccgacccgcaccctgatggttctgggcaacttcaacatgaccaatacgccggaattgaaccagcgcatgattgaacgcggccagcaccccgtcttcggaacggacacgcagactgtccttgaagaaatagggtatcacctggatgaagcccacacggacctctaccgcgccttgcgggacagcggcatgcccggcccggaaataccccatgccatttcctcccggctcaacattcaggaaattatccataactccgccaagcaatgggacggcggatatgccatcatgggagccatcggtaacggagactacttctgcctgcgggatccgcacggcatccgcccatgccactacctgattacggatgaattcattgccgtggcctccgaacgcgttccgctgatgaccgtttttgaagtggaaagcgaacaggttcaggaacttccgccggccaacatgctctctatcaaggcagacggcacacatgccattacggaatttaccacacctctgaaaccggctccctgctcctttgaaaaaatttacttctcccgcggaaacgatcctatcgtttaccgggaacgcaaggcgctcggcgcggcgttgacaccccaaatcgtggattctctggaagaccgttttgacaaatccgctatcacctacattcccaacacggcggaaaccgcctactacggcctgctggaaggcctgcgcgtctaccgccgcaagcgcgtgcatgcccagcttctggaggccctgagaaacggcactctggatgagaacatgctggacagcgctatcctgaaacgctggccgcgcggtgaaaaaatcgcccacaaggatatcaaaatgcgcactttcatcacgcaggaaaaaagccgtgcgcaactggtctcccatgtatatgaccttacttacggcgccgtagggccggaagacgtgctcgtcgccattgacgactccattgtccgcggcaccaccctgagaagatccatccttcgcatcctgggccgaaccaatcctcggaaaatcgtcattgcatccactgccccgcaaatccggtatccggactgctacggcattgacatgtccgaactgggcaacttcatcgccttccaggcggccgtctccttgatcaagcagcacggacaggcccgtctgctggaagaagtatacaaggcatgcagggaagaactggccaagcccaaggaagaacggcgcaattgcgtgaaggctatttacgaagggttgacggaggctgaaatctccagggaaatcacccgtctggtcactccgcatgacgctccgtgccccgtggaagtcattttccagaccatcgaaaacctccatgaatccatagaaggcccctgcggcgactggtatttcaccggagattacccaactccgggcggatacactacagttaatgtggcatacatgcgctggtttgagggtaaagggggccgtgcatacgatttgcccttgtagcggctccctttttttgggtattctgtcgacaacatgtcgggatccatttcatacacgaccttggaagacaccgaactggtcgccagggcacgggaaggagattcgcgggcttttgacgaacttgtcattcgccacagccgcaaactccatgctaccctgtaccagatgacggacaactacgacgatgcctatgacatcgcccaggaagcgttctccaaagcctaccgggccttgcgctacttcaatggacaaagcgccttttacacatggctgcactccattgccgtcaaccacgccagaaacttcctgaaaaaacgcaaccgcagaatgacctacagtctggacgacgacgagtacggcgaccatacggaaaaggacatgaacatggcggatgaaacggacggggcggatccggaacgccgtacccatttgaatgaattgcagctcaaaatcaacgaagcattgaagaaactttccactaaacacagggaagtcgttgttcttcatgacgtaaaagggctcaaccatacggaaatatccgccctcctcggtatctctgaaggaacgctcagatcacgtctgcactatgcccacaaggaactccaggggctgctggcggaatatctaagttaatcaggaaaaaaaatattgaacgtccattcccgccgccatgtcaaacgcatagtcccaaattcgggactgacacattctaacttctattatacttaacatcaacgacgatggataaacaatccacagatcataaagaggaaactctggtggccatgctggcatctttccgcaaggaagcctgttaccatgacaccttcgaggaagatttcctccgcaattttcatctcagaaaggaaaccgatcaggctgcccactctgcttggaaattgctgctcgaacgcctggacaattatctgcagaactttcgtggttggcagtgggtctatgcttccatgtccatcgtgacattggctgcggtaggcgttattatcgcatccggaaacatggatgaaccttctgaatcttacgtatcctccaccaaggataaggaagaaatactcctgacgaaaaaagccgttcccgtaagtaaggaaactattgaacgaacctcaaccgaagttgctcccacggaaaaacctgaattcaccacgggagactcttcatatgaaacatcggccaaagacaaccagctgaaacctgattcccatgccgataaaaaaccggtatcccgcgttctcattgagatgtaacaatccatgatgaacctggctccgatattgacgggcatagccgttgcaggcctgatttgccaggcaacggccgtgcctgtcccttttaaggtagaagccatcctcccccaggcggaaggggcgccgtatgcgaccatggcggcgcaaatcggtaaagacatgctggcctccttgattccctaccgggttttaaaaaacggaggcgtgacctaccacctcggggacaagagtacccctccccttcaggtttgggcccaggaaaagctcacaggcctgacaatctttaaggtggatccagcccatatatacgacgggcaggcagacctgacccctcccggcattcttaaacgcggcgacaaactgtcctttgccagcagcaaaaatgagaccacgcagggaatttacgtgggcatggaacattccatcggggacaccagtttccccctgaggctcatccgcgcccagttccccaagctggcagtcccccccatcggccaaccatgctacgactctgaaaaccgtctggtcggcattgttctgggcgtttcccgcaaaggaacctgccacctgctgcccgcccgtgccatctccttcctggcaacccatccggaagccaaaagagtgcgcctgggttgcctgctggacatcaactcctccacccccgtcattgagggccttatcaacggaggccctcttgctcgggcaggaatccagaccggggacatcctcatcaacatcaacgacacgcccatccgcaactacggagacatgttggacgccacttattacctaacgggagacaaacctctgtctatcgaagtcatccgcggcacccaggtggtaacaagcaagggaatcctccccacgcaggatccccgttaatccaaatccgggctccaagtaaatgccggggctccggacggctcccgctcaaaatcgcccagaaccttctttcaggcttgaactcgcccgccggcgcacttaaaaaagggcgtgcttcaaatcgtcttcaataaaatcagcgctgcggaagtatccagcatccccaccttggaacagctggatctgctcggagacttccaagtctcagaatccaccctccagaccctggatgacgcccgtttcggcaagatggaaaaggatggtaaaattctttatcgctacgtcgccaaagattaccgcatttactttgaagtcatcgaaggcaaagtgatcgtccaccgcgttctgcacgccaacagcctgaacgatttcctgtttcgcaccaatatttccccgactgccggggaagatgaaatcctgagccagtccaagcacttctggaaacttatcgacgaaggcaaaaacgcctccaaagcctgaccttttcccattcatggcctgcatcattctgggcgtcaccggctccattgccgcatacaaggcggcggatatcgcttccgccctggtcaaatacggtcatgaagtgcactgcgtctgcacagccaaggcccttgaattcgtcactcccctcaccctgcacacgatttcccgcaaccccgtcttttcctcctttgaggatgaaaagacggactgggttcccccacacatccaactggcccaacgggcggatcttctgcttgtagccccagccacggcaaacaccatggccaattttgcccatggcttcgctccggacatgctcagttccctctacctggcttgccagtctccggtgcttatttgcccagctatgaacgtccacatgtgggaacatgcggccacgcagcaaaacgcggccgttctgaagcaaaggaaggatcattacatcctcggccccagtgaatctggaattctggcctgcggagcggaaggcgcgggaaaactcatgccggtggacaggattattcaaaaaacactctcccttctgccgtaaggacggcaaaaatcgctccatgcctgtttattggtttgcccccggagaactaaatcttctatcatggacgcatatgaaaatgctcctgttcctcttcagttccctcatgctctgctcctgcggtccggataaatatcccattagctttcatatggagacgggagcgacggacagcaaaaaattcgcctttgaaagggacggtcattactatagcaaggccccctttatttcccataaggacattgaatcctattattccttccctgcgccggacaacacctacggcatcgtcgtcaacgtccggaaaggcctgggcagccgggtggaaggaataaccgcctccaacctgggcaggcaaatactgcccatcgtcaacggccatgccatgcagcccctgcgcctttatagcaaacctgtcacctcaggaaaactggcagtcatgggagggttctccccggcggatcttgccgccatggcggaatttattcccccggcggatcccaagagagaagaacccatcaacaaactggccgccgttaccaagcctcttcttcccagcaaggaccctgctcaggaaaagaaggaggccaaagaccctgaagaacacaaagaccgtaccgtgatcagcacccgccgggggcggatctgagccagcacccctcgtatcagcatgcacggcaaatcctttcctctcctgaccggcatcctcctgtttctttggggcatgccattcctgatggcggatattgtagtgcgcttccccacggaaaatacagccctgctggacaaccgcccgcaggacttttacatgtatgtagaccgcaattttgaagggaagaaatcccagccgtgggaagctggagcctacggctttacccggaccctcgtcagaacccaggcaggccccgtggccgtcaaatttcatgagggtatcgacattaaacctctcaggagggatgcttccggcacgccgctggacgacgtgcaccccgtagccggaggcacggtagtccatgcctccgccaacccaacccatagcaattacggtcgctatgtggtcattgagcaccagctgaaggacggcccgctttacagcctgtatgcccatctggcctccgtctcctgcaggaaaggcgaccgggtaggaaccggaaacgttattggaaagctgggatactccggggtgggtttgaacaaaacgcgtgctcatgtgcatctggaactctgcctcaagctacaagatgactttgaaaactggtattccagtctgaaactgggcactcccaaccgccacggttcctataacggactcaatttggccggctttgacccggcacccgtcctcctgcaatgcaaggacggggcggaattttccctctctcgccatatctcctccctgccggtccaatacgtcgtgcgggctccctcttccggcgaactgcccagccttgtcaaacgctaccccttcctgctgaagccggggccctccgaccccaaatcctgggaaatcagtttcacgggagaaggggttcccgtttccgtgactccttccagccaaccgtgcacggaacctgtcgtcatccgggccgttccgcatcctttctcccaactgtacaggacctgcaaccgcgtttccggctccagcaaggaccctaagcttaccgccgccggcaaacgctacatccggctcatcttcatggggcctgaatcataatcctacgatgatgcaaaccttttccagattccgttttccccatgccgttctcacatcctgcgcggctgtcctgctttccctgggcggcgcttcccctgcagctgccgccccctctgcgggagacacctttccgcaggacaggcaggacctcctgaaaaacaaaaaataccagcagggactgaaagccctggaaaaccgccttcccctggaagccagcaaacacttccaggaatgcctgtcttcccaaaaccttgcggaatcacaaaaagccataatccgcccctttctggcagaagccctgatccgcgccaaaaaaacggaagaaggactgaatgcctgggagcagctgccggactctcccatgaaatcctactggacggcggtaggcctcttcaataaaggctcctttaccaaagccctggaaaaacttaccgctatcccggaaacggatccgctttccctctacgggcttcaattgaaagcccagcttgcgcgccagcttcaggaccggcagcttttactggaaaccctcagcaggctggggcaggcggaatcccccgccgtctcccgccccgcgcgccttcttctggcggatgtactggtgaatcaggaatgttaccagaacgccgccgccattcttgaacaactcaaaacggaagacgggacggacagcaaccggctcatacgttcatacgccgagctcatagaaggcaagctggccggcaaacagggaaatctggaccaggccatcaaaaccttctccgccgttatggacaacaaatcctatccggaaaaaatccgtgatctgggccgcctggctctcgccaaggcggaaatagatcgggaaaaaagcaatccggaacaggcggaagaggaaacgcggtccctgcctcaggaagaggaagctccgcacaccgccggaacggcggaggaacgcctgttggcgttcattggcggcaaagcggaatccgccttgctgatggacgccttcaacattctgctggaggaagacatctttcgaaccaatccccaggctctggaaaaactcaacggctgggtaaaagccagggatgcatcccgccagccggcagccatgtatgccatgggaatccttcttctggaaaaagatgacctgtcaggcgccgtcaaaatggcggaagaggggctctccaaatatccccagagccttcccgttcaaattctttctctgaataccattactgttttgctggataaaaaccgtctgcaggatgcggaacgtcttatttccaaatatcccggttcatcccctgacctcgtctttcaacagggagccctggctttcctcaaaaaagactactccctggcgcagaaatttttccgggaagcggcccgccgcgcttcggaaacaacggcggaaaacgccctgttcaatgaaaacctggccgccctgaacgccaatgacgcctccggagctgccgctctcatcaaggaagcctcaggctcttcccggctccgggagagcatcctctttgaacaggcccattacgccgctaaaaggatggcccctcaggctgctgaattgctggcaaatttcataactctggcggaaactccggccctgaaaacccaggcgcggctggaccaggtggaagtagccctgaatctcaaccctccggacctggaaaccgtgcaggctatccttcccctgttggaaaaagagcagttgtctccggaacagaccatgcagctggcgcggctgaatattctggaggcggaaagccggcaggaatggcccaacgccattcagtcctgccgacgagccattgccctggattcggaaggcaaacaggcggacatgctttacctcaaactgggagagcttctgtacaaaaacggagacttccatgaagcgcagcttgtcctccagcccttcccctccaaataccctgacagccctcttcaggcggcagccctctttctggcaggaaaagccgcccagcaaagcaataccggcagcacgctgaacgccgccctgaacatcttcaaaaccctaggcgcgggggacaccccctttgcccagcctgccagaatagaagaagcctccgttctgctgcgcatggggaaagcgaaccaatgcatcgtcgccctggagaacctgctttcctccccattgccgcgctacatgcgcctgctggccctctccatccaggcggatgcatgggtagctaaggaagatacccattcggacactcttcgcaaggccatcaacctctgtacggaaatcctggacacgcccaacctgggactggcctggaaattcaaggctctgacccagcgggcccagttctatgaacgaatgaacgaacaaaaaaaagcgctggatgactatgcctccattctggcccatacgcccagcggaagttccgccaacaaacgcagggactggcactggttctacaacgccggcttcgcctccatccgtctgctgggccagcttcaggactgggacggagccctggcgctggcaaaaaaactggcgcagacttccggccccagagccagggaagcagcggcttacgcgcgccgcatccagctggaacatttcatttggcaggatgaaccggaagcctctgcgccggaaaacggaaagacggcgacaccggatcaaaccgcggattaagaagcctttcctcctgtcatggataccccccccacagcaaaaaactggagactcaacgcagcagccatcatcatggacgctgaaggctgcgtattgctgggcaaggacagcggccgcaacccgtactggcactttccgcagggaggcgtcattaaacacgaaagcattgaacagactcttgcgcgggaggtatgggaggaagtgggcctgcgccccacggaatacaccattgtcagccgcctgtccggcctgcgttacaaatacccttccggcaaccgtaaagttacgcgctggataggccaggaacaaacctactttcttgtgcgctgcaaaaccaggcgccctaaaacggatttgcaccgcagccccgaattttcaaaaacgaaatggattcccctccagaatctcaaactggaaatgttccccaaattcaaaaggaaagtcatcaaaaacgcccttcagcaattcttcgggcccggctttccttccaaacacgccgctgtgaaaacatcttccccctcctcaccctcatcttcaacactaacttcgcgtacgatgaaccgttacctggtgcctccgggcaaaaaactgcgtttaaaggattattctccggatgacaaatctctcttctccggaaccaaggaagaatccctgattgaattcgacaaactgagggaagaactgcaggaactgcaaaaaaaactttttgctcagcacaagcacaaaattctggttattcttcaggccatggatgcaggaggcaaggacggctgcgtcaagcatgtcttctcccgggtggatccgcaggggctgcacgtagtccccttcaaaaaacccactactgaggaactggaccacgatttcctgtggcgcgttcacaaggaggtccccgccaaagggcagatcgccatcttcaaccgttcccattacgaagatatcattgccgtccgcgtgaaaaaaatcttcccggacccagtctggaaacgccgctacaagcacgtcctcgactttgaagccatgcttgcggaagaaggcaccgtcatcatcaagctattcctgaatatctccaaggcggaacagaaaaaacggctggaatccagacttcaggagccggataaactttggaaattctgcatggatgacctggatgaccgaaatcgttgggatgaattccagacagcctaccaggatctcattgaaaaaacatctactccggaagctccctggtacattatcccggcagaccggaaatggtacagaaatctggttgtcgcccgcctgatggtagaaaaactgcgccatctccagctttcgctccccactcccaactttgatccagcctccatcatcattccagattgacaaaatctgtcataacgataactaatttgtgcatcgtaaaattatttttgtacatttctcggtattcagttgtcccattattacaaaatctgcattattcacaataacaatcaaaacttagaatttctaacgcttgactgttctagtgaaaaattgttagaaaacaacttaacacctagaacgtgtaaacattctacatagaaaaacaaaatcaaatgtatttagcatcccaacgcaaagagttcattttgaaaacgctggccgaacatggagctgcaaggaccattgctctggccaaacagatgaaggtcacggatgaaacggtccgcaatgatttgattaaccttgaaaaacgcggcttcctcaagcgcgtccacggcggcgcactggcgcttactcacaaatccctccatgaagacattgtcactcaagatgatgtgtctatcaggattgcaaaaaaaaccgttcagaatattcccgcttccgtggttatgttcattgacagcagcaccatgggctaccaaatatgcaaccacatcaattccaaagatacgcatgtggtttccaacaaccccacgctgctgacccggcttgaaggcattccgaacctgagtttctattgcacgggcggacacttcgaccgcgaagccctggtctatgtagggcaggacgccgccaaggccgccggatccctgagcattgacatggtcgtgctgacgccagactgctactcccccaagcatggcgccggatacaagaacatgttgcaatccgaattcatcaagagcgtcatccccgcggatgccaaggtaatcatcgccatgccctccaccagcgtagcgaacaacccggcattctataccgttgcgccctcccaggtttccatgctcatcactgatgaggccctttctccggaaatggccgaccagattgaaaagagcggcgtcaaggtggaactcgcctaacgccggcctgctttacagggggcggaagttcatcggaacttccgccttttttataacgatcatatcctctctcttttccattccatccggtactcccggcttcccgtcagctcatcttccctggagccgatttcttcaaaccctccgcgccgatagaatgcgcgggcgcgggcattctcttcatagaccccaaccgtcagcattcccttgctgtgttccttcacccagtccagcaacgctgtacctatcccttcacactggcgttccggcgccacaaacagagcggccagttccccctcccccaccaggcaggcaaacccgacaacacggccaccgtccctgcacacccatgtacgcgccctgggcaggtacacctgcctcatatcttccaccaaaccgcaccagaaccccactcccgcaaaagagtgggcttgttcggacgctttcagccaaatattcaaaacctccgtttcatccctattctggtaatgttctatcttcatacatcaataacaggtatgcggcaacccttcctgtagtttatacaagctagcatggaggaggcatggaactcaagaaagaaagtcccgccttccggtaaaaatgaaaggaaaggccatgacggacagcttttttccaccctttccccctcaccacatcactgtcccccggatcatggaacacaaaaggccatctgaaagagctaccagcctttccgcccttcaactacggcctgtacacaagcaccgggccggtacgcgaagactggacgcagcgcaccttccgaacagcggagcccaccagggctgcagcctgctccacctcttcctgcgtcgtcatgaaagacagggaaaaacgcagggaggaacgtaccgcctcatcagataatcccatggccgtcagcacgtgggaaggcatcggctgcagcgtatggcaggcagaccctgccgaacacagcagaccagcaggttccagcaacagtatcagcgcttccgccgtacatccgtcaaacgccagattagaagtattgggaatacgttccgttccgccggaatgcaccgtcacgccgcccacctgtgtccgcaggagagactcaaaagaatcccgcatccgggacagccgtccggcgtcctcctccaagtgcctcaatgccgcccgcgccgccgcaccaaaaccaatgattcccggaacattctccgtgccggacctcaagccgtactcctgccccccgccgaacagcaaaggggaaaaaggagcccccgctctcctgtacagacatccaatccccttggggccatggaatttgtgggcggatacggaagcataatccacttccattccatgcaaatccacgggaatttttccggcgcactgcactatatccaaatgcacgggaactccatgcttcctggcggaggaacacaaaaccggcgcatcctgcaatgcgcctgtctcattattggcccaggcaaaagaaacgccggatacgccccctgcgcacatcgactcccatttttccggaatcgctctcccttccctgtccacagggcagacacagccgcagcccagggccaaagccgtcttcaaggaggcgtcatggtccgtggacaaaacgcctatccccccctcctgccccccggccatctggcggaaagccatattggacgcttccgttccgccggaagtaaacacaatttccgaaggaaatgcgcccaacagagcggcaacggccgcacgggcctcctccaccgcctcacgcacatgcctggcacagccgtatccggcggacgggttgaaaaaccgttcctttaaaaacggctccatggcctcgtaaacctccggagccagcggtgtggtggcgttattatcccaataaatcacgccttcataactcccccaatcgcgggaaggagtcaagccggaacataatgcgcagctgcacaagatcactcttcacttttacccgtgattccgcataatgcctctcatgcgttttcttatcacggcaggccccaccagggaagctattgaccccgtcagatacctcaccaaccactcctccgggaaaatggggtattgcctggcggaagcggctgttcacgaaggccacagcgtccttctcatctccggccccacttccctggacattccgcacggcgtggacttcctgccggttgaatgtgcacaggaaatgtatgatgctgtcaaaaaccaggctccctacgccgacgccgccatcctcagcgccgccgtagcggattatcgccccgtctccgttccggaccgcaaaatcaagaaaacgggggaacgcatgattttggagctggaacgtactgcggacattttgggctccatgcgtgcggaattcggcttcagcggcattctggtaggctttgcggcggaaacccatgacgtggaaaattacgcgcgcggcaaactggaacgcaagcggtgcgatatgattgtggccaacgacgtttcccgcagtgacattggttttaactcctctgaaaatgaagtgctgctcgtttacccggaccggacggagttcctggaaaaagcgcctaaagcacaaattgcccttcaaatcattgagcgcgcttgccgtctcgcacagggaaaagctccgtcatggcgcacggcagacccgttccacgcttgaagcggcagggagtttgccccacgatccaatgccggcatgtaaatgccggccacctttcccagaaccacattttcacttttcatgcccgtcactcttcaggatttaggctggaacgaccattttcaacgcgctttcgacgccgttgccaaaccaggctggatgccggggcgtctcatccgggaaacgaaaatcaacttcactgctcttctggacggcggggaagatgtggacgccgtcgtcagcggcaaactctggcatgatgcggccacggatgcggaactgcccgctgttggagactgggtggcgattgatccgggagaagcgggagacgaagccgtcatacgcaccattctcccgcgccagacctgtttttcccgcaaagctccagggaaaagcagcgcggaacaggtattgggaaccaatgtggatattgtggccgtagtgacggaaccgggaacggatttcaaccccaggcgcatggagcgctactttacactcatccgccgcagcggagcatctcctctcatcctgcttaacaaaacggatcttttttccagggaggaagtggaaaacgccatgcagattctgcgggagctctccccggaatgcgccataatcagcatcagcgccctgcacaacaggggaatcacggaatcccgcaaatgcctatccaagggaaaaaccatctgcatcgtcggctcctcaggcgttgggaaatccaccctggtcaataccctgctgggggatgaatggctctggacgggagaagtcaatgaagtaaccggcaaagggcgccatacgacagtggcgcgggaactggtgctcctcaagcatggaggtttgctgattgacaatcccggcatacgggaaatccagatgtggactgatgaacataccctccgtgaaagctttgcggatttgacggagctggcccatgaatgcaaatttgcggattgcagccacggtaaagattccggctgcgccatcaggaaagccgtggacgaggggaagctggacaaggagcggtacttaaacttcctgaatttggaaaatgaaatcgcccggcttgccaaacgtcagagaaaaaggcaaatgaacgtggaacgggccggaaaaagagaccggaaagtgcaggcccggaactatgaagaccgcgtggaactggaacgccgccacaaacccaaccaccgcagccatgactgattcgccgtcaaaattggcttgtcaaactgcaaaaacgcacctaatggtgaagaatgctattttcacgcggcctcatccgaactttcctggctcttctggcattgggggcgattcccttatctgcagaagaacagccgcttcctgctcaaggcggttccgtcgtgtccattactgacctgaagcccgtaaagctggagagggatgctcacagcaagcttcttgtagcgcaatgcactgtcaatggagtcccatgcaatcttattgtggacacggcggcttcccacaccacatttgatatcaaattcatcaaaaagaattttcccggcctgccgcttgaagacgttcaaatagcccctggttccaacgtccatgccgtcccccggctatttgccatgcagtccttctccatgggcgggcttcatatcaaaaacttcttcggccttgccctggatcttactcccctgcaaaaggacatgcaggtgaagatagacggcatcctgggcatcaactacctggggttctctccgttcctgctgtccgtcaggaatgcttccctgcagtttctggaacgctcccgcttcccccaacacaggaaaccgctggatgtggaacgtgatccttccggaattttttacatccgctgttcccgggggggagacactttcccgctggctcttgactccggctcttctctttccatggccccgctggaacagtggcccgcagatccggacggcaatcagctcaccaccaaggcaaccgacattaacggacacaatggggactgcactgtcatgaaactgggtatcccctccacgctccgcatgggaccggacttccaaatggacggcctttccttcgccgtaacgggaacagggggccgataccagatcggcgtggatactttccagcattttgacatcatcattgatgctccgcagggggaagtcttcgcccttcctccccattccaggccggagccccagaggcaaaaaaaaactgatatcaaacaggaatcttgagcatgatgcagatcatgcgaatggtccgggccgtagcgccgaaatgggccttcaacgccacttgggcgcgggaagactgggcatgagccagcagggggttgtccagcatctccttgagcacgtccgccagtcggttttcatcacacctggcaattccgtccactccttcaagcagctggaccagtgcatcgaaattttccatatggggccccgtcagcacgggcacgccacaggcgacggcttcagccggattctgtccaccgtccgccaaaaagctttttccgatcacggctacatccgccaacgcggtccagtccctcaattcccccgtcgtatccgcgatgtaacaaacatgatccttcagggtttccggaatctcgccatcagtccgcagcacgcactgccagccctgggcctccagttcccgcaccacggcatggcggcgttccgcatgcctgggcacgatcagggggaagccccccgccttgcgcgccgcttctgcgatcagaacttcctccccgtcatgcgtgctggcggccagcactacaggcttgccgcgtttcagtttgtccaaaatggaggcaaactccgcattagtctccctgcgctccgccatttgctggtcaaatttgatgcttcccgtcacgtggataatggaggaacgcacgcccacggattcaaacctccggacatcccccttgtcctgtacgcccattgcgtcaaggaaggaaaaataatactttgaaatccatttaaatgcgcggtagcggctctcggacctggcggacatacgggcattaatcatcgccatgggtatgccgcgcaccttggctgcacgggcaaaattcggccacaactcggcctccaccaggacaatggcctccggttcaaaacggtcaaaacacttccccggcagccccagaaggtcaaagggggcataaatcacgcgcacgccgggaatctgcgcactcactgccgtagcatgccccgtagccgtactggtagccagcacggcggaacctccgcgttcccggagccacgcccggagaaacttgagagccagcaccacttcacccacgctcacggcatgcacatacaacacccctttcggctcccggttataggagacccggtacagcccgaaacgctccagaagccccgtgccgaatccgcctctcctcttctgcttaaacagataggaaggcagcgttaccagccacccgacggtatacaggatattgtaacagaaggaaaacaggaaggctttcatcttacttctcaggcaattggtagaacagcagcatatttttcccgtaccggcgggtatccaccagattcaggccgtcaatttccgcggcgccttcccttccggtaccccagccctcctgcacttccgcaataaacacgccaccgcccttcaaaagtccggcaactccggcctccgccagttcaacaataaagtcgcggtccgccggccccttgcaataaggaggatctgcaaaaataatatcgtacttcctgccggccagcagttcccttctcacgaactggacggcatctccctggatgacagttccgccttccaagcccgtcttgacgagattggccctggccgccgcgcaggagagacgggaaaaatccaccatgcgggcgtctctcgccccacggctgagggcctccaggccgaaggcgccggacccggcaaataaatccagcacgtcggcccggtccatcagcgggttcaggatggaaaaaacggcttccctgacccggtctgtcgtgggacggacttcccccttgggaacagacagggttatgccgccggcctttccgctgatgatacgcattgttgtcttaccggaaatgaaaggaacatcatatccctactggcgagccttggccttagccttttccagcaaagggtcacccgcgatgcgggtaacgggaacgcgcagaacgatggactggttggcaatggcaacgttgtccgggttcttttcagacatgttgtaaacgaaataggcatacttgccgtccttggtcttgcccgcaatgatagtctccgtcagggtggaaagaatggttttcttttccattgtccattccttgccgctccacgcgccgtatacattcagatcgtcataggacacgtcccctttcagggtcagggttccgttgggagaaatccaggatttggtactggaatcatatttcagcgtgctcatcggcaacggcccctgctgcgccacagcagccaaatcccagatattccgttcccccgaggcgaaaatacccagggccacaggggccacttcctgcacctgcttcagcttccagcactccaggtacttggcatattcgtccttggtccagcccaggcgctcatcataaggaacgggctggccggggacaatctggccgacaagctcctttttgtccttgtcgggcagggaggcgaaaacgccgtctatcttttccatgaacggctgcaggctttcatcaagcacaacgctgacggcggcggcttccgccattttaccgaccgggagatattcgtcaactatttccggcttttccgctgcggacagggaggaaaccagaacagggactatcagtgttaaagccagattacggagcgctttcataacgtgttcgtatattttactcaacaaaagacccttggcaagagtcaaagtgagtgttatccgtatgtacatcatgagttggaagttacttttcactaccctgtccgccgctctgagccttgcttcctgcgtgtccaccccggcatcgcgcatccagaaaaacccggcccttttcaattccctcccgcccagccagaaaacactggtggaatccggacaaattgctgaaggaatgtctccgccggccgttttcctagcctggggggacccctccgccgtagcggaaggcaaccttaacgggaaatccgccactcgctggatttattcctccctccagccggtttacacccctcccccctctttctgggccggcccctactggggcggtccctactgggggccgggcttctaccgtccctattatccttattacaatgatgtcacctatgtgccggtaaacaccggatacgtgcttttcatcaatggcaaggtgcaatcctgggaacgcaggcgctgacggaaacggagcctgccctatggcacggaatgcaccggcgcagcagaaggagggcaatctcccgctgatgcgccgtttttctctccgcgtttccgaatgccgctctaatccccgcccctggacagggggcgttccagttcctcccggaatttgggaaagaactccttcaattccccggaaaccttcggatattccagcctcatctccgccagggcctccacaatggcgcacatgcagacaagccgggaataccatttgttgtccgccggcaccacataccatggagcctcccgggaagaagtatggcgtatcatctcctcatacgctttctggtactggtcccagaattcgcgttcgtgaatatccccttcagaaaacttccaatttttgtccggagtatccagccgtgccaaaaggcgctttctctgttcctctggggaaaggttgaggaatattttcacaatgctcgtcctgttggcgagcaagtggcgttccaggttattgatggacctgaacctctcctcccagaaagcactcttggcatgggagggattaaatccctccccggccagaaactccggatgcacgcgcacgctaaggacttcttcataataggaacggttgaaaatgccaatcatcccccgcctggggaggcgtgctacgcaccgccacaggaaatcatggctccgttccagcgtggaaggctgcttaaagctgctgactacgcacccctgcggattgacgcctcccatcacatgcttcacaatgccatcctttcccgcgctgtccaacgcctgcaacaccaccagcagcgcatgagactcgctggcatacaatacttcctgaagctgctccagcaattcgatgcccttttccagcttatccacagcctctttcttgctgtctttgcccagcttgccgagatcgccgggatcatagcgggacaacttgaatcccctgccgtccgtcacccggtacggttcaataaatttcctgcatcttttgaccaggcgggaagaaatatccatcattcctataatgacactgtctcttctcaaaatgttgaaacaacagcaaaaacatcaatacccctctcgttgggagattccaccccgccgatagacgacaaacccccggcataattcggaacgttcatacttgccggaagactctatgggctggagaaaagcagcataatcggatggccgggaaactacgatcaccttataatcagaccatttgtcctttaacgggccgggaatccatccataaaactcctttccggctccattgcataaaagtaaaatgtcaacatgactgctctgcaacaatttgcaataagataccgcagagcggaaatcttcacggccatacaaatcattgcaacgaatacgaatatcgctcaccgcccaaacaatcatcattaataggaacaggatagtttgggcaatcctggggaacgaccaatcccatgacgccaccagggaccaggccagacacaatacaggcaataacggcgcgcaatgccgtccggaaaaacggaaatccatcatttccgttccataaaggaatacggcccctggaagcaatatcaacaccagcaaagcaggaaccaagggcttctcaacccgcttattccacaaaatgatgccgcaggcagaaccggccagaagaatggcgccggagatcatccctgcccccaatccgttcatattccataaagcatcaggagtcatgcacatcctcaattctagacgggaaggccccatgccggccaatcccgataactcgtacatggaagcgcatgcattgactatccaggaggaagagatggaaaccgcacgggcgcccaagaaaagagtgtaaagataatatgctcccaacccggaaaatggaaaaatccaccagagcagggctcgccgaaacctccgccctccaaactgccggaatgccatgaccatgaatgccgcggcaaaaccgagcgcccatacaactcctgtcaggcttgtaagacataaaaaaaacagagaaccaaaaaagacatgaaattttaccggttctccccggctaacctgccaaaacaacatggagacagcgcaagaggctgctatctgcaacatatagggccgcaactcgttagaataataaacaaaaaacggtgaaatcaaaagaatcaccagcgcctttggttcctttctgaaaaaccaggatgacaaaaatacccagaatatattgaataacctcagcatccattcagactccgcacccgtcagatgatgccacaaaaataaaaggtagtaataaaaggccatttgagcatcgctaccgccaatttcacaaatcttcttccaacatccctccattccctgctgcatggcgcacaatgcagtacaacattcatcaatccaaaaactttggttattcagggaaaaaaagaaagacaaaaaaggtaaaatccaccaatatttgatgcccccgtcattgccttccgccgccctcttttgtcccctgcacatagtgcaaggcaacatagcggattgcatatccgccgcctgcttttttacaggaagaaatcacatatccatatgaatatcaatagataaatatgaaaatagatttgttttttcttcttatctctgcaactttgaaaagttattgatgtttttatcttagaaaaatatgttgccaccggatatgcaatccgcaaaaaaatgttgtttatacggatattgcgtaaaataaaaaacttatccaccaaagcggacctgatctgatggggtattttccagcttgcagtcctcaagggcccatgtgcggggaggcagcaccttgttatctttaatcagaatattggcgcatcttctgaattggaaaggtttctgcccccatcccttaaactcgtcattgtaaatgaccttattattgatgaacttgaggttgtccgtggaaatggcgaacagcagcggcacatcgaacgtcttgaaaacattattttctatcagcacattgcgatgatagtaatccctctgcctgtccagctgcttgacttccgggtaaatggaaatgatggcattcgtaaactggtaacgcgaggtcaggttgttaatgaatgtatttttgcggatcaccacttcatggcaggcgccgctttcataccacccctgggcatcccctgccaatagaatggcggagccggaggaatggtcaaacaaattgccctccaccagcactctctccggcgttgtaaaaagagatcctctggcacggttgttgcggacgatattgttgcggaaaaccacggaagggtaaaaatccgcattctccacggcatccccggccctgacggaggaggggagcggctcttccaccgtaatcaccatctccgcggaattctttttcactgccgtcttcacagtggccgttccgccgggttccagcgtaggatcgttgatgaaacggattttttcaccgggaagaaacacctcaaaccccaccgcctgccgatgcatgtatttgcacttcagggtatggctgtccactacttccatcacgcccaggcaggtggaatgaacattgatggcatcatccatcatcccttcgaacagggctttctccaccacgattccgccccgggtattggaaaaatgggttgcgtccgctccggcggtgtgtacgcgccctgtgcctttcctgaccatgactccgccgcctttcatatgaaagtcctccgatcgctggaccagcagggccatgcctgagctctggtgcagagatacgtcattcagtgatgttttccgagcccggtacaccacgcatcccggatgggggcggttataattccgaagaaccagcgtatcccccggcttgattcccttctgcctgaggttccaggacagacggagacggctcccgcccagcggctccacatgcccgttccagccgatgtccgatgtattggcgataatatgtcccgtccctttctcaaaggccatgcagcttcccattccttcttcccagcctttcccctggaaaacgaacctgttgttccggatttcgtaagggtaggcctttttgtctatttccacttccgtgaaccggtcatccgtcttcacgacgcgcgcctccgtgcaccaggaccgttcgtaatccacggataaacggttgatgctgacattttcgctgtccatcaccaggaggggaaccaccttgccgtgaaaaagaaacagggaaccattgccctccacgcggacattccgcaaatcggccagaggcacacacaccggatgaatcagcggctggtcatggttggaaatatggaaactcatgttcaaagccccctccggataaaaatggtaaatgcctctggggatgttcaaaacgcccccgccctgcctccggagagcggaaacggcagcccgcagcgccggcccctgatcttttctgacgccgggaaccatgccgaattcagaggcattcaccacagctcccttcatcccctgcccacttcctgtcgtcttccaggccagatctacccagtccgcatggtcgtaagaattattgtccacccggtcggccatcaggtaaagatgccgtatgccgttttccgccaccggaatggaaaacttcttcgcggccatccccctcctcatcacgccggaactccataaaacctcggacccgctcatcacgcggaattccacgcttccgtctccatccgcaccgtcatcaattccgcatgcaccttccagcctcaaaactttcgggttttccggaacgggcaggggaatcatggacgtagcgtgcgtaccgattcccgtggcatattttttgccgcctatgctcaaccccgcattactgaaagaccggtccaaccgggtttcccccgtctcctggcgggccatcagcaggctggaggcaggaacttttacggctatggttccggattgggcagcttcttcctcgccccgggactgtgccgggaataatcccgccaaacacgctgcaactacaaaactccatgaaaacatccggctgaacatattttttatactctgttcccgtattccttctatcagaaaaaatatggatcgtccagaagcttccatcagagaaaaagagagattgccttccataccgaattcagggacactgtctccatgcgatcagcattcttcctactgcccggcatcctgccggctctttccgcctgcgggcgcggaggcgccacgcttgaaacggataacgtccaggcggaatggttccccaacggcagcagaacggcgattgtcctggaaggggaaagcgaacccgtttccgaacgggaaatccggcatccccattccggcatggctcttttttaccattcgctgggggacggcagaggaactttggaaatcgcaggaggggttccggaaacggctacagtaacatacagccaaggagcggcttccacggagctgcatttcaaaacggcctcccgggaaatacttctgaatgacgtacgccgcccggacgcgaatgaaaaaacggccttcctgaatggctggagcagccaggaacggggcacagccctgctccgttccgggacagccggagccatgaccacggaaaaaaacgtcccatgaatcttctgaggatactgaaaacgggaacatggaaaatcccgtgcgcacttctgcttgccggggttctggctctggcatgcgtccagtgttccgtccgttccctggtgtacctgccgccccaacccaaggacaaaaccgcgtatctggaaaaacgtgccgcctgggaaccgcatcggcgcaccttccaccataatggggccaaactcagcggatggcttattgaaaaaaaggggcagcccctcctggtatattacggagggaacgccatggatatttccatgatgcttccctacctggaccgttttccccatgccaagctcctggtcaattaccgcgggtacgggctcagcaccggctctcctacggaacaggatatcatgggagactccctggctatccttgactccgtgctgaaggaaaccggaagaacgccggacgacgtcatcctggtcgggcaaagcctcggttccggagtcgctacccaggtagcctccgtcagacacgtgaaaaaactggtgctgctggtcccttttgacagccttctggaaactgcccgcggtctcttcccatacctgcccgtcaggcttctccttccggactacttccggtcagacctggccgcgcccaaagtcgcctgccctgtcagcatcctggctgcgggagcggatgaagtcattcctccgcaccacgccaaacggctccgggactgtttctccgtaccggtcagttaccaggaattccccggagccatgcataataccatctggctcagccccggctttgataaagcgttttctcaaagcatcgggtactgatctccgttttattccgcaggagccagagacacgcggcgcaggcagcttccttcatgttccagcagcagccatgaggtttcttccggcagcgcttccggaaacaggttggcccattcgacaatgagcacagtctctccgtccagatactcttcccaccctatgccaatcagctcggactcatccttcagccggtaaaaatcaaaatggcatgccggcaggcgtccgtcagcatgctcatgcaccagggaaaatgtcgggctggcagccgcctcggaactccccagcccctccataatgccctgggtcaggtgcgtctttccggcccccagctcacccaccacgcccagaatttcgccgggcattaaaattttacctatttgcctccccagctccctcatttcctccggggaatgagtcaaaacggggccctttctaaaaattttatgccattcgctcatttttccatgaaattttgcttgtctaaaataaagtcatatggtttattgcggctcccgcatctgcgggcgaaccttaacagtgatagcaatggcatacgcaattttcaaaacaggtggcaagcagtaccgcgtccagacgggcgacgtgatcgacgttgaatgcatcaataccctcgaagagggggccgaagcaagcttcgatcaggtgcttatggtggaaaatgacggaaaagtgaccgtcggcacccccatggtggaaggagctacggtctccgccaaggtggtcagccagttccgcggcaaaaagatcatcgctttcaaatttaagcgccgcaagggcttccacaagaaaaaaggttcccgccgcgccatgacgaagctggaaatcactgctatcaacgcctaatttcaacccttaatttttatcatcttatggctcacaagaaaggtcaaggttctgtcaagaacggtcgcgactcccgcagcaagcgcctcggcgttaaaaaattcggcggacaggaagtgatcgcgggcaacatcatcatccgccagcgcggcaccaagtggcaccccggcaagggcgtaggcatgggtcgtgactacaccatcttctccctggtggacggccgcgtgttctttgaccgcgaaggccgccgcgtcaatgtggctccggaaggatctgaagccgccaactaaaatacggattactctatctccctgcaggggcggccatccacagggatgaccgcccctttttctgtccttctccgcgctccaataaataacaggaattgttcttgcaaaacaatagcccctcccccactatccacgcagagcatgaaaaataagatatgaatcccaaaacagattccaagcaggccgtccgcactgcctctaccctgccggtcatttccgggttgaggcttaccaagcaaaggcaggaagtttatcaggttcttctggaacaaagggatcatccaacagccaatgaagtttaccagcgggtacgcaaaaaactccccagcatctccctggccaccgtttataactgcctggaggcgctggtgaaccacggcctggtcaatcaggtcaactttgaacgcagttcttcccgtttctgtcccaatctcgttgagcacggacacttccaggacacccggatcggacgcatttacgacatcaccatcaaggaaggcgtggaactgaaggaattcatcaacttgcccgacgacgtgtgcgtggaagaagcccaaatcaccctgaggggttccatcaccacgccgcagggctaactctctttcatcatcatgagtctggtcattaaaaatttgcacgccaacgtgcaaggcacggaaatacttaaaggcatcaatctggaaattcccaagggagaggtgcatgcgatcatggggcccaacggctccgggaaaagtactttatccaaagttctttgcggacatccggactatgaggtaacggagggagaagcctggctggacggacagaacctgctggacatgagcattgacgaacgcagcagggcgggactcttcctggcattccagtaccccatggaagttcccggcgtttccaacgccaacttccttcgtgcggccatgcaggcccgcatgccccatggggaggaactggatgcggtcaccttctacaaaacgctctatgcaaaaatggaccagctcggcatggcccgcaaattcacgtcacgcgccgttaacgaaggtttctccgggggagagaaaaagcgcaatgaagtgctgcaaatgcttctcctggatcccctctatgccattctggacgaaacggattccggcctggacatagatgccctccgcattgtctcggaaggagtcaactccatgcgttcccctttccggagcttcctggtcatcacccactacaaacgcctgctggactacatcaggccggatgtggtccacgtgctggctgacgggcggattgtccggaccggaggcggagaactggtggacgaactggaaagcaggggatacgagttcctgaaagaagcggaaacagcggaaaaggcataacgccgccaatccggcaatcaatcatgagcgatacacctgacatgtcagagaacgggaacacacagaacctgtttgacttcgaccggagcaaggggaacttctccttcccggaacgccataaatttgatgccggatacggcctgacggaggccaccattgactacatctgcgacgtcaaggaagacccggaatgggtgcgccagttccgcaaaaacgcgcttgccgtttttgagagcaagcccatgcccacccactgggcttctccggatattaaaaaaatagacttctcccaaatccgctactacctctccgacggagaacggcccaaacgaagctgggacgacgtgccggaggatgtaaagcgcaccttcgaacgcctgggcgttccggaacaggaacgccagtttctggcgggcgtggaagcccagtacgactccgaatccgcctactccaacatgaaggaggaactccgcagccagggcgtcatcttcgtcaactccacggaaggcctgaaacaccatgaagatgtcttccgcccctggtttggaaaagtcattcccacgggagacaacaaattctctgctctgaacagcgcagtattttccggaggttccttcatttacgtacccaaaggggttaaactcaaacatcctctccaggcgtatttccgaatcaactcggaaaatttcgggcagttcgaacgaactctcatcattgcggatgaaggtgcggaactcatgtacatggaaggatgcacggcaccccagtttgaaacttccaccctccactccgccgttgtggaactggtcgcgctcaagggcgcgaaaattcagtacgtcaccgtgcaaaactggtcctccaatgtcttcaacatggtcaccaagcgcggccttgccatggaagatgcggaaatccgctggatagactgcaacattggttccggcctcaccatgaaatacccggctgtggtgctcaaaggcaggcgcgcgcggggggaagtcatctccatcgctctggcaaacacgggccagcatcaagatacgggagccaaaatgatccatgcggcggacgacactacgtccaacatcgtttccaaatccatcagcatcggcgaagggcgcgccagctaccggggccaggtaatcatgggcaaagggcttaaggggtgcaggaacaacacggaatgcgacgctctacttctggcagccaacagccgtacggacacctaccctgccatcacggtaaaaggggatggaggcacggtgcagcatgaggcatccgtctcccaggtctctgaagaaatgcttttttacatgcagcagcggggcatcccgaaagctgcggcgatgtctctggccgtcaatggattcattaacgacctcgttcaggaattccccatggaatactctgtggagctgcgcaggctcattgatctggaaatggaagacagcatcggataaggagggaaataatgaaccacttgtttaacgaagaacaattttccgcaggctttcttcccgcatggtttgaagtccggcgccgccatgccctggaacaggcggaacggcttccggaaccttcccgccgcatggaatcctggcgtttcggtacccccggcaacgaatccctggaacatgctgaagcggcccttcctgtggcgccggaagccttgtctcccatcatcagggaacatgcctccatgccggaggccctccgcattgtttacgccaacgggctccccgtgtccatcccggaagagcttccggaagggctttccgtcatggatatggaagactttgtgctccaatgcccggataccgcccggaaatatttggaaacagagacggaaacgctcggttccgagaaattgtcggcattgactacggctctccagcacaacgggctggttattatggcggacagggaaatctctccccctctggaaatactccacttcatttccggagataacgtggccgtttttccctctacgctgctcattgcggaaaccggaagccgcctgcacattctggaacgccaccttagcgcagaccatggccgccaattctgcggagcgctccagcagtaccacctttcctccgcgtcatctgtcaaatacgcgctggttcaggaacttaacagccgttcccgtgccgtggagctttcccatattatggcggatgattccgcggaaatggaacatctcgtcagccatcccggcgcagcctgggccaggcaggagacggtctgcatcctgaacggagacggcgcaggagtccgcctgctttccgccaaccatctgaaggaaaacaaggagctggaccagaggacctgccagaagcacctttaccgcggagcctccagcaacctgctttatgccaatgtgcttgacgatgaagccagcagcattttcagcggaatgatcctggtggcggaaggcgcgcatgacaccagcgcctatcaaagcaaccgcaatctcattctcagccccagagcggaagccaactccattcccggcctggaaatcctggcggacagagtgcagtgttcgcacggttccgccacttcctccatttccccggaagaaattttctacctgctttcacggggcattccggaacagacggcgcgcagaatgattgcccagggctttctgaaacatgtcttggaccaattcggcgatgaaaccatacgtaccgcggtagaaagcatcatcctgccctgaccgctatttcatgaaacccaaaaagacggagagacggacccctatccctccttttccgtcctgatattaacgcgccgctgcaagagagccgccacaagcagaaacagagcagttccccccatcatgctgtaataccattcacggtaaggcgtatggtactgcaggaggatttccgtctgctgttccgaatccggaacagaaacaagaatagaatagcgctcagtactggataaaggaagctcttcccccttcccggtgcgggcgctccatcccctggaatagctctcaagaacagacaattcctttgttcctggcggcacagtgacatggatcttattattcgttctccaatccggaacaacaggagaaaaatgattcttttccccctgggttcggacaaaatagcgtccacggtacaagggattttccagcaagaagaaatcttccgtttcctgaaccagattccacccgtcaaaagacggccttccggctttggcatcacacaacaaatgagaaatgccggccatggcataatctttcggataataatgtccatccgacaaaggtctcagatatctgggctgcaccgtttcataacctgaggccagccttattccatatgtggataaatgattagtacataaaaaatccaagtcattatgaggattgacgataacaacggcaccatcccccacatgtccgcgaaactcggacatccattccggttctttataaagatagccgctttccggtttgtcggaataggcaatccatgaagaagaaaacactatttgttccccaaaggtacataataccacaagtcctgcccaccacttcggataacggctggatatattcaggcgggaacaggcccagccccctacgctgaccagtaaaatcaataaggcattgcgccaatcccaaatcatcagctgatccaggagacgctcgcttctgagcaaataccaggaatgacggtatttttgctgagaagtcgttatgtttccgtcaataaagctatgtaattttaacagcaatggttcatggaaacactgaactgccaccgatacggcaagccatatacacaaaattccaattccccaccatgcaagtctgcgccagataggaagaaccggatgccgcctaaggtcaaataactgccatccggcaagccagctcattccaaaagccatcacaaccgtggagcgtgaatagaggaaagtggaaagaggtgtgcatgaaacaattaaactgacaagaaaacaaaacttggcggtcaacggtgcccggcggttaaacaatgccagaacagccagcacaaaaacaactcctccaccaaatttgatatcgaataaatcagcgccaatcactttggaaatactgattgtctgaggaatgccgaagagcgtcggcatcacagatgtggccagaaaaggaatattttccagcccccagacaaacggcaagcttttacagccttccatgcgcggcagggtgtccacaaaaacatccaaggaaagcaacgccgccaaaaatccggagatcaaataaaaagatgatgatttcagaaaaactttccaggataagcggtctgcccgtttccaccaatccgcaagaaacacgcacagcaccaaaagaaaaacaaagagacacgcttgcaaatggcctcctctgaatccgagagcaataaagagaatagagggaagatgcacccatttgtttttccttctcccttccaacagggataagacaatcaatggcgcccagattattccaccaagccaccggtcatatatccacataataaactgggaataaaaactgaaactcacagctcccagcaatatgtacggaatgggaattcccctggatttcagtagaatgatcatccccagccctgcgataaaaaactgcagcaagattcccgcatcccatgccgtccagaaaggaagaaaaccaaataaccaatgatgccaatcccccgggcttaacatggtattttccggcagtgaagtcccattgtgagtataagggttccatcccatatacccatcactttgccaggactgctgcatcgcccagctataaggtaaatattgagaagccccatctacgttatattggttatggacttcctccattggctgagttgcgaatggtttgaacaggcattccacacaatccaccggggctaaaacctttcctccaaacacggcaggagcaaaaaaaagcagtacaagtactgcccaaattattatcccccaccacaagggaatttttctattttttttacaattcatttataataaaaatctgacattggctcctcatgcatccccaaagaaaattcctgtaaattaacgaatgaatttctccacagaattgttaaaaccggcatccatcgttctccttcagccctgaaattaaaccaatgaatcggaacgcctttttctagcggatttacaatccggagtcaagctgtaactctaagagaaaagaacttgcaacgtcgtttctttacgtatcagggcctcttacgtagcacagaaatttgcctgggcccaccctggtgacgggaatacgggaaattgctacgatatccgggcctgaagtagaattttggcaaaccctcttttatagagttcgttgcatgttgaagcggagtcacgtttcaataaccgtataaagagcggcactttccctgagaacaagagtttttttcttttactgtccgtaacggattgtaaatccgcccaccttctcaagaaagcactatttcattgaaaaatgcttcacccagaattattttcatcctgaattcccagttaagcatcttaagaaaagcatcaaaaaatctggccggaatgatatgaaatagccttgcagccggtttatgacctgtccgacaagcaaattgctgccacaaatatttatgattcatcattccatataaaaatataaataaaaaggaaccggacaaacaggaacggcgcgaataaataaataatccgaaataaaaggaatccgaaaggctcaccctgtgagcatctcatccggcatccggtaaggaaaacgaaactattttttgaaacaaggaagagtgtttctccgttattattaccgtatggtcacattttacaatatcactctctctaccgccttttccctgctgatgctgtccgtggcggaagcggcacggcccaatgtggttctcatcaatgcggatgaccttggctgggcggaagtgggctgctacggccagaaaaaaattaaaaccccgaacattgacaagctggcctccgaaggacagcgatgggtttatttctattccggagctccggtttgttccccttcccgcaatgtgctgatgacgggcaagcatacgggcaactgcgacgtacaggatttgaaacgcgtggacgcgggcgaaaactggcgcgacctcaaaggagactggcccatcagaacggaaacctacactctgccggaagccatgaaaaaagccggttacgccacagcggtgttcggtaaatggggtattggggatttcggttccactggagcgccggacaaacacggcgtggacaggttctatggctacacgaaccagaaagcctgccacacctactatcctccatacctctggaatgacggaaagaaggaagttctcaacacttccctgacagccgccaccatcggacacggttcccagcccaaaggggaagttctggcggacacctaccgtgcggaacaacacagttccgatcttattgcggataaaatgctggaatttgtgaaggaaaaggcccatggcaaacaaccgtttttcctgtattacgccccgctggaaccccatgtggccatgcagcctctccaggaatggattgaccgctatccccgcgaatgggacaaatccccctaccgcggcaaccggggctatctgccccatccccgcccccgggccgcctatgcaggcatgatttcccagatgaagcacaacgtaggacgcctgctggacacgctgaaagcctgtggcctggacaaaaataccatcgtcatttttaccagcgacaacggcaccacgcatgatgtagggggggttgaataccggtttttcaactccgtagccgatctcaaaggtttgaaagggcagctttatgaaggcggtatacgtgtccccggcattatccgctggcccgggaaaatagccccgggaaaaaccatcacccagccggctttccatgcggacgtgatgcctacgctgtgcgctctgacaggagcggatgcaggttctccgctgggaacggacctctcccctgtccttctgggcaaaaaatccgctctgcatgacaggaagcccctggtctgggcagggggaggctacggcggccaggtagccgtgcgtttcgactccaagaaagtcatccgccgcaacctgtttcccggtaaaaaaccggacaactgggaagtatacgatatcgtgaaagaccccgcagagaaaaataatatcgccgcagaaaaccgtgaccttatcaacagagccatcgccattctggacagggaatatcaacccgcgcccggcttccaggccctgcgttacaaggccccggaacaggtagccgaataagagaacgggaaagaaggttccacgatccgcctccttcgccattctgaccttgacgtgaacggagccggggttagtctttcacgcatgagtttgacatcatccctcctttccagggtgctcggaggcggttcctgctccagagaagaattgatagccctcagccgggaaccgctggaagaattgtgccaggcggccaacgccatccgggaacatttttgcgggaatgtcttcgacctctgcaccatcatcaacggccgcagcggcaaatgttcggaaaactgcaagtactgcgcccagtccgcccattactccacggcagtggaggaatatccccttttaagtgatgaagccctcctggcgggggccaggtacaatgacgaacgtggcattctgcgctactccatcgtcacctccggcaagaggctgacggatgaagacgtggaccggctctgcgccagttaccggcacatcgccgaacattgcggcatctccctctgcgcctcccacggccttatttccaaaaaacactgcgagcaattgaaagccgcaggcgtttcacgctaccacaataatctggaaacttcccgccgcaatttccctaatgtctgcaccacccatacatacgacgacaaactgcaaaccatcaaatgggctctggaagccgggctggaagtttgcagcggcggcattatggggcttggagagactatggaagaccggatagacatgtacatggacatcgcggcgctgggcatcaaatccatgcccgtcaactttctgacccccatccccggaacgccgtacgcggacatgacccctctgggagaggaagaacagctgcgcatcgtggccctggtgcggttcatcatgccggacggcttcgtccgcatcgccgccggcaggaataccatgaaggaccacggcaggaaaatcttcatgtccggagcgaatgccgccatctccggagatatgcttaccaccgccggcgtcaccatccgggaagacctggccatgctggcggaactgggatatgaagtccgcatgaaataaggtccgtcccattttcgcgccctttgccatgaatcactccgactggtcaaaaaaagatctggaatacatctggcatccctgttcccagatgaaggattacgaaacgctgcctcctatcgtggtcgaccacggaaaaggcgtcaacctgtatgatgtggacgggaaacgctatctggatgtggtcagctcctggtggtgcaacctgctgggccattcccaccccaaaatcaaccgtgccatcaaggaacagcttgattccctggagcatgtcatcttcgccaacttctcacacaggccggctatcactctgtgtgaagaactgatgaagaaaattccgcgggggctctgcaaattcaatttctcggataacggttcggcatccatcgaatccgccatgaaaatgagtttccaataccactaccagaccggaaacctccagaaagtacgtttcatgtccctgagcgacgcctaccacggagaaaccctgggagccctctccgcaggaggcctggacctttattcggaactctacaagcctcttctgctggacatcgtgcgcattcccgctccggattgctaccgctgccccaaggggaacaaacgcggctgctgccaggcggaatgcattgacgctgcacaggaggcctttgcgcgccatggggacgaatgcgccgccctgctggtggaacccctgctccagggctccgcaggcatgcggatgtatcctcccgcttatctggcgaaactgcgttccctgtgcgacgcctacaacgtgcacctcattgcggatgaaatcgccaccggttttggccgcacggggagcatgttcgcctgcgaccaggccggcgtttccccggacatcatgtgcgtctccaaagggctcacgggcggctatatgcccatgtccatcaccatcaccacgcagaaaatttacgatgccttttatgcggactacagggaaggaaaagcattcatgcacagccatacctattccggcaatccgttggggtgctccgcagctctcgccgtgctgaaggtcctggacgaggaacacattattccccgggcgcaggaaaaggcccctcttttccgccagatgatcgtggaggccctgggggatcatccccacgtgggggaaatacgcagcctgggcctggtgaacgccattgaactggtggagaacagggaaaccaaaaaaagctttccgtccgagcagaggctggggtaccggatttacagggaagcccttaaacagggacttctgcttcgccccctgggcgacgtcctgtatttcaatccccccctcgtcatttctccggaggaaatggaggaagccgtatccatctgcgcttcctgcatctgcaaagtgctgggataaacgttcatccggcacaacaagacgaaccgttcttttttgaagaaaagatgcaacttttcttcgggacaggggtttgtaaggataccttgcaatcttataccgccatgatacgcctcaccccgctccgcaaacgtccggcgctttccgcgctggtgcttctcctcctgggctccggcttctgccaggctcaggaaatgcttaccgattccgcaagaaaggaagcttccgaatggcttaaggaagtcaaagccggctacctgaacaccagctcttcccgcatccagaaggccgtggccgcccttaccgcggccaccagcacggaaaacgccgccatgaaactttacgtggatgccatgaaggatcggtttctgaaccccaccagcatgatgtcccgcatgctgaaccggggaggcgggggcggcttccgcatgatgcgcatgccgggttccggagggaggggaggcaacagcagcaagcctgacagccccagcaccgccttttccaactggcgcaagcagaatacgggaaacaacgtagctcccggctttaaaaaagcccttcaaatccagtgcaaatggatgctgctttgcctgagaaaagcggacgcggaaaaaaacgaacgtgaccttaacgtttcctccagcgtcctgtccatgctggatgaagtggccgccaacgccaaggatgtaggcgaacagcttcccatggtaagcggagccagcgaagtcatccgcacctacctgaacattggagactaccgttcggaaaccctgccggacaacctgatggatctcaataccatcttcgaccgcgtactgctggctccctacaaggagaaaaaggatgtggaaaacttccggaaactctggaacaaacgcatcggcctggaagcgactctgctgcaaaacaactccgccagcgataaaaaaacagcggaagcagaaaaagccgatttcctggttaaaaggcagtgggaacgggaaaaggcctgctttgaactcggcgaccaggtagcggcacttgaaaagatgaaaagcctgatttccggcatcaaggacccttctgaaaagcagcgtgccatccgcgacctggaattcctgcttcttaccccggcggaacaggcgaaactccgcgaagagcgcatgaacaaacgcatgccgggcggcccgcgcttttaacaatcgtcgccaagccccagcctccctcctttcatcccccgttgcgtaacgcgcatcgggggattttacattgcggagagccgcatttccctgacggaggcagcttccttcctgccgggttggaaccatgtcttgcgcaggcggtaaatgcgcacgccctggatattctcatccagatgccaggctgtgcgaacgccgtgctgctcccagatatggcggctgagcatccccatgaacttgctgtccatatcggaaacgtcaccttgcggagtgagacagacaatgtacacattatccctgcacaggttcagggaggactgaccctcccaccccatctccttcagtttccgctgtacgggtttcaacggaaaattccagccgcccagcgtgacaacgttcttccgggaacagctccaggccttgcggaaaacagactgccccggggccagatcgtcaatagtgccgccggacatctggacgcaaaacagggaatcgggctcccggtccacccgctcgcataacaggcgcccggcatccggggaaaaagactccagattagcctcccacacggcggcgcacgcctgggacaaagaaacggagaacgcgcagaacatgggcacgccgcccgcaagagctcccttccccgtccaggtgatgcggatgggacgatatttatccgaccacagcagacacagccctgcaatcaggaacgttggataaactacacggaaatacaggcggtctatgctggccatatacagcagaatcagcaccagcagggagcctacgcagcacaccagggccggagaatccccgcgccggaaagaaacgcggcatgccagaccgaacaaaatccagcaagggagaagatccataacggaatcccatgaaaacagatgcaaggctttctctccacgggcccacgccctgggccagaattcacctccgtcccgcgccaacagaagcctttccagataatccgtattgaatacatccatatcgcaattggtaaacatccggaccatcctgatatcgttggcgaacacgccgtacttttcacactggtaggcgctctcctgcctgatgggacacgtgtccgagagaagggcgcgggcctggttccatgccgccacgtcacatccctccagcacattccggtgggcgtatttattatattcattcagactgaaggacgcaatgagcacacaggccagagccagccagagacgactgagggcaaacagtttttccctggacggcctgaggccttccaggctgcctgccagcaggatggccccccagaaagcgtcgcacaccagggcggcatccagccggaccatgctgcccagcacgcacaggaatactcccgcgcaccaccccctccaggaagagccgtacttcaaacacgccagcacacctgtaaatcccgtcagaaaggcggcatggctgaattgcagagcggcgtaaaaacccggcatgatcagaagccacaccagcagcagaaccagcgtattgaaatcatatctgcgcgccttgcgggcatgcgccgtcagcatcgtgaaaatggccgcgccgctggacaacgtggcaagcgccagaaacacaggccagacggacaccccgccaagggcaggcgcagctttcaacagaagcccggtcaacaggggattgacgaaaatgacatgggcatccgcataagagggatccccccatccgtcaagcacggacgcaatcaccagatcgtcattggactggtacgccacgcccacaaggctccaggccagaaccagaagcaacaggttgaaccatacgggatggagcagaggaaaaagcgatacccatctccaaatctgtttcaacataagcaaattccctgactttacagactgttttccctgtccggggacgcatactaggaacggggaaaatgaaagtcaagagccgatccggatgaacaaaccggaggggctaaaaggctgcgacctcttccttaacggttcaggcagacgataatgcccgcgataatcatcgcgttgccgcccactttgcgcatggtgatcggttttccgaaaaaaatccggtcaaacaaaaggatatatacatatgcggagcattccagcatgttcaccgtaatcatcggcaggtgggacaggcagtaaaacgtcagcaggcagcagcccaaaaaaacggaatatgccgccatcgtggccggattcacgaaataggcaaggccggtcagccggtcattcatggcagattttttcaaaaccacctgtgtgcaggaagcaagaaaaacggaaaacaggttcagcccaatataaaattcttcactcatgcgcctcctccgtggaaaccaaaataatacccccgatgaccagcgccgctcccgccgccagcgtccaggaaagagcctcccccaggcaaagccatgccagcaggataccccagatgacaacggcggaacggttggcataagccacacccaggttgaattttttcagcatgacctgccatcccgccgcataaatgcccaacaggaacagcacgccggccagcagggcgaaccggcgccagtccgtccaaccgtagggggcagccatgcgccccagcacggtattcagcgcgtaaacgataaacagcaggtgcagaatcaggtagttgatcatgaaagaaaaaaagagacgggaataattcactcataccggcgcgccaccaccacggcgggcctgtgcttggtttccttgtaaatcttggaaatgtaaatgccgataacgcccaggctcatcagaatcaagcctccgaccagccagatggaggccacggaagaggcccagccgggaggggctacattatacagaagctggcgcacaaccacccaggcgacatacagcatggctaccagggtgaccgccaggccaaagtaggaaatatacaccagcggcctggcactgtaggaaaccacggaattcaccgccagcgccatttttttgcggaaagtgtaggtcgttggagaagaggatgctttcttcaccctgcacggcacctgccggaaaccggcggaaacgcacagcccaaagaaaaaaggctcccggtcctggaatttcagcatctcccgcaggaaacgcgcgctcatcagccgcgccgtgaccatattcctggtaatctgctggtcggaaagcaaattaaacaatgtgtagaacaattctccggaaacggcttcaaacaagccgcccttcctcttctcctgcaccccgtacaccacatccgccccggtagaatccatctcacgggaaaaatcaaccagccactcgggagattcctccaaatcactgtcaatcaagaatacgcgctctccccgggcttcttcgcaggccacgtacatggccaaatgatggccgaagttgcgggataaatccaccacgcgcacccggccgtccttctcccgctccttcaacgcctgttccagaccgttccttgggcagccgtcattcaccagcaccacctccgtgcgggaggggtcataacccgcctcaagcgcggcggcgaaactgcgggaacagaactccgccagataaccgcccgtacaatacacggtagccacaatggacaattgaacctgtggatcagtcataacgcttttacatacatgagaacgcgcttcctttccccgcttttcacgcacacctcgtccttttccggaacacggacaaaacccatgcgctcatgaaaacgcacggaagccgcattgtcctccaaaatccgggcatataaccgttccaggcccagctcccctgcggccagctccatcatcccggcatatgcggcggaagccgggcgcagttccctgaatgccctgtcgtaaagataaatgcctatctctccgcaacgtgtattccggtcaaaccagggcaggtaaaccagacccagcggaacccgatccgcataaatcacgcaggcgcgggcatcctccccgcggacgttcctttccagccacgcccggtgctgctcctccgttacctgatccaacaaaaaaaacgggctgaccttttcggaattgcgccacacgcgcaggcggctgcgcatggcctcatccacatcagacacgttgaccaggcaaattttcatcatgattcaactccctccagcccgaagccggcccgcaacaccttccggcagccttcttcccccaaatcgtaatacaaaggaagcctcagcaacgtatcgctggtgcggtccgtatgaggcatggccccggcagaacgcccgaatttcatcccggcaggggaggaatggaggggaatgtagtggaacaccgctttaatcccgtgctccgccagcttgttgatcaagcgcgtgcgctcctccatggaacggagcagcacgtaatacatgtgggcgttatgcgtgcaatgctccggaacgcacggacgccgcagcaccccctgttcttccaatggagccagagcgcggtggtacatatcccaccacttcagcctttccccgttgatctcctgcccgtgttccagctgggcatacaaataagcggcggtcatctctccgggcagataggaggaacctacgtccacccaggtgtatttgtccacctgcccgcggaaaaacctggcacggttggtccctttttcccggataatctccgcgcgttccatcagggaggggtcattcaccagcagggctcctccctctccggaaatgacattcttggtctcgtggaaactgtaacagcccaaatggccgatggagccgagccgacgccctctgtagcaggagccgacgccctgggcagcgtcttcaatcacatacaggcgatgcctcccggcaatttccatgattgcatccatttcacaagccacgcccgcgtaatgaaccacgcaaatggcgcgggtgcggtccgtgatggccgcttctatcagcgtctcgtcaatattctgcgtatccggcctgatatccacgaatacaggaacgccgccgcgaagcacaaacgcgttcgccgtagagacgaacgtataggaaggcatgataatctcgtcgcccgggcggcagtcgatcaacagggccgccatctccagtgcggcggttccggaatgaaccagcagaacctttccggcgccggtgcgttccgcaagcagttcatggcattttttcgtgtaatagccgtctccgcataaatgggcgcgctggatggcgtcccggatataatccaattcgggaccgtgctggtgaggttggttgaaaggaatctccatggcttcagaaaagaccggcccatgacggacgcccggcgcgggcatgccgatcccggcggaaggcgttccccgcctcccgcacggggagaccctactatgaacggagggctgaaaacaagcctagaccttgatgaaggtccggtttttgtacatgtaatacaacacgccccaaatcagggcgtaattgcacaggtaaaagacaaacctgtccgcatccccgaagcactcgctaaacccggcaaacaatacccgggagaaattgcccgtaggggggcacagagatacccatatgtacacgaaaatggcattgctccctattacggagaaaaagaatgtcaaccagttcaatttcagcacatccgtcagcagatagaacagggccagcagaaaatagcaccatcccgccgcccacaataccatggaactggtgaacaaacgcttgatcatcggaaaatccaggctccagacatatcccagcgccaggcagcccgcgcccgaacataacagccacgccagctttttcccgtgcccctgcacccgcttcagaatctggccgcccagcagaccgagcatggtcatggcgccaaaaccgaactgcgccagaatccacgcataattcgttccatcctgccagtttcccatcaggtatttatccagcagcagggccagattcctccccggttcaagcattcctgccgcacaggaacccaccgcggggtcagaaaaggaaacaaacttcatgaccagccagtacacagccagcagcccccccgttgccgctacctgccaccggatggacagatgaagaaggcaaatggccgcaatcaggtagccggaggcgatggcctggagcgtattgcagtacagggacatcctggacggttcaaaactcagcagattgccctgcaccaccatgcccagcaaaaaaagcaccgctacccgcctggcaaccttcaggtaaatcttccacaagggttccgagccgatgcgtttggaaaaggaaaacggcatggccgttcccacaatgaacaaaaagaggggcatcaccagatcccaggcggcgaatccctcccaagccacgtgcgtgctgtgcttcaccagccactcggggctccggtcgtaaaaaagattgatgccggccacaaccagagccaggcccccggtcaggaaaaacatgtcaaatccccgcagggcgtcaatggccgcaattctctgcggcctggtatcggaaagtgaactcatggcaacattccaactacggcaccacgtccgccaacctttccaaagactttctttttctaaggctccgcaaagaaaaacggctgtttccggaaaaacctgtccttcacggcaactccgtcatgatgcctttctccatattccctgccccgcatttcatgctatgctgcccctgcaacatgaccatggggaacgaccaatccggcgaacgcgacagcttccggaatattgaaacttacgctcgcatgaaaatggatgaacttggtctggcagactggcaattcggctgggaccgggccaaaagaaggctgggagtgtgccgtctgctggaaaaaagcattacgatttccattcacttcgtccgcgccaacctggagacccctcatgaaatccgtgacacgattctgcatgaaatcgcccacgccctggcgtggacccgccacggagaacgcacccacggaccgcgatggaaacaaatttgcagagaaataggggctgtcccgtgtgcctccgccaaaccggacgccatccgcgtcaccacgtacaaatatctcctgcgtctgaaaacgacgggagaaatcgtcggcaaataccaccgccgcccctctttcgccaaatacctcaagcgcatggccctgaaaggccgccccgatacgctgggccagctggagctggcgccttatgaagaataatctccacaaaagctgaaaaaacgagtcgtttccggctattctccagcatcaacgatcatcccattccgggcatttccattttttacatctgctcattatccggaacagcagaggaaacactcaaggtgcgctggcgtacgtaatcgtacaccttcgggtcgctgtctccggctgcccagaccacccgcaggaagtcggcgggatgaatatttccgtgatcccggaagaaacggcggtcattctcacagcagtaaatgatgtcatcccccatggaaccgacgagcttggcccgcgccttggcaatcaggcgcggaaggtaggggagaccgcagagttcgtcgccgaaccccggcaaatcatacccgatcacaggtttcccctggtaaaactgcccgtgctggacggtcaggaagaagtcccggcgcgccgcagccatcagcagaaccgtggtgggggaaggttctcccgtacgggcataggtttctacaaaatcaaacaattcccgagtgcggcagccgatggaagacagaaagataatttcctgatccgtaaagaagccgtccacattcctgtggccttcatggtagcgccccaccgcttcgcggaaaaggtcgtaaaacgtatcgttccaatcttcttccatcatcggcccggcgatttatgtttgcgcttgaagttaagcatcatgatctgcttggtcagattggcttcaaagcgggcctgttcctcgcgggacatttccgaacgcgtcttgagcacctcctgcgcttcctgaatggcccgttccacgctaccttcatcaatctgggaggaattaagcgcgaggtcggttaccatgagaacatggtcgtcattgacctgcacaaagccggtacccaccaccatgctttcctccgggccgtccatgggcttgtagcggagttcccctggttctagggaggtaatcagggccgtatggtgttccagcacgcccatctccccgagactgccgggcagataaacgtattctacagtagcggcaaccgccacttcatccggggtaatgactttgaactccatgctcatggttcgggacggcgggaaaagggttatttggcttccttgaggacgtcatcaatgccgccgcgcatgaagaaggcgtcctccggaaccatgtccagcttgccttccaggatttccttgaagccccggacggtttccgccacgggaacataggcaccgggaatgctggaaaagacttccgccacatggaacggctgggtcaggaagcgctgaatcttgcgggcgcggctcacgatgagcttgtcttcttccgaaagttcgtccatgcccagaatggcaatcatatcctgaaggtccttgtagcgctgcagcaccatctgcacgccacgcgccacttcataatgctcattccccacaatttccggggccagggccttggaagtggaagacagcggttccaccgccgggaagagcccctgggccgccagagagcgttccagcaccaccgtggagtccaggtgggcgaaggttgtggccggggccgggtccgtcaagtcgtccgcaggaacatacacggcctgcatggaggtgatggagccgtgcttggtggaggtgatgcgttcctgaagatccgccatttcctccgccaggttcggctggtaacccacggcggacggcgtgcggcccagcagggcggacacttccgaccccgcctgggagaaacggaaaatattgtcaatgaacagcagcacgtccttatgttcctcgtcacggaagtattccgccatcgtcagggcggacagggctacgcgcagacgggcgccggggggttcattcatctgtccgtacaccagcgccaccttggattcttccggtttctccaggttgatgactccggattctatcatctcattgtacaggtcgttcccctcacgggtgcgttcccccaccccggcaaaaacggagaggccgctgcgcgccttggcaatgttgttgatcaactccatgatgagcacggtcttgcctacccccgcacccccaaaggcaccgattttgccgcctttcaggaaggggcagataaggtcaattaccttgatgcccgtttccagcacttccgtgctggtggattgttcgtccaacggcggagcgccgcggtggatgctcttcataccggcgcaggagagtccgccgcgctcgtccacagcttcccccagcacattgaaaatacgtcccagcacgcactgtcccacaggaacttcaatagggcgccccgtgtcgcgcaccggcatcccccgccgcagaccgtccgtagaactcatggccacggcgcggacccagccgtctccgatgtgctgctggacttccagaaccagggtcttgcgcttgccgtcaacttcatagtccacttccagcgcattgagcagggcggggagcgtttctgcctgggagaagtctgcatcgaccacagcgccgatgatctgaacgagaatgcctgtgttattcatcatgggaaaaacttggtgttgaaatggagaggaaagaatgttctgtttgaaaagcgggtaaagaaagcggaaccatgttattccatagcgcgcatagccgtggtaatttccagaagttcgttggtgatttgcgtctggcgcgccttgttgtagtccagggtgaggccgccgataatgtttttggcgttttccgtggctcccttcatggcgaccatgcgggcggagtgttcggatgcccgggcctccagcacaatctgaaccagtccgtggaaaacgtaaagaggcaggatggtatccagcagagcagcggggctgggttctagcaggaattgcttatgggcatctgctccgtccagggaagagcctccggctttcgccatgttcatcaggggttccggctcaatgggaagaagctggcgaaagacaggcttctggaccattgtgttcacaaaaccggagaaagccacgaaaacgcgcccatattcctccgccttgaacttttgcacgatgaaatcaaataccggctttagttccagcagggacaggggatccgtcaggctccaggtggcctccaaccgttcattcaatttggcgagcgcagcattcagcttgcggccgatggtgatgtaatgggcgttttccggggcctgttcccggaccattttgatcaggttggcgttcagcccgccgcaaaggccgcgatccgtattcaccagcagcaccagatccgcgccgccgtgggtttgcatcagagggctgttgctggtgtcaatttcatcctggagatggtagagcacttccgccagggcgcggatataggggcgtcccttgacggcctggtcctgggcgcggcgcattttggcggaagccaccatctgcatcgccctggtgatctgggacgtgtttttgacggacttgatccggcgtctgatgtctctcagattgcccatgtgtcagtactcccgtaatcgttagttccagctgagcttgaaggattcgatagcggctttaagccctgcgtctatttccggcgtcaggtctttttccttcagaatgctttccagcagatccggatgctgatcctgcatcaccacttcccacgcattctggcattccttgatcctgtccaccggaacgtcgtcaaagtaccctttttgcatggcatacaagtcagcggcctccagacccagggatttgggctcatactggttctgcttaaagagctccacgatgcgctggccgcgggccagcttggccttcgtgctggggtccagatcagacccgaactgggcgaacgcctgcaattccgtaaattgggccagatccagcttaatggagccggccagcttcttgataattttcgtctgggcggaggaacccacacgggagacggaaatacccacgttgatggctgggcgcaccccctggtagaacaggtccgtttccaggaatatctggccgtccgtgatggaaatgacgttcgtgggaatgtaggcggaaacgtcgcctgcctgcgtttcaataatgggaagagccgtcagggaaccgccgccgtgttccttgttgatgcgcgcggcgcgttccagcaggcggctgtgcaggtagaatacgtcccccgggtacgcctcgcggccggaggggcggcgcagaatcagggaaatctggcggtaggccacggcatgcttggaaaggtcgtcataaacgataagggcgtcttcccccttgtccataaagtattcccccatcgcacagccggcgtagggcgccaggtacagcatggcggcaggatcggaggcggaagccgccacgacgatggaatatttcatggctcccgtttcctccagtttcgccaccaggcggctgatgttggcgcgcttctggccgatagccacgtagatattgtagaggggctggtgatccggaagcttgccttcctccgccagacggttctgttccgcctgggcaatcatggtatccatggcaatggcggtcttcccggtggcacgatccccgatgatgagttcgcgctggccgcggccgatgggaatcatggcgtcaatgggaaggatgcccgtctggacgggcacggaaacggattggcgggagatgatgccggaggcgattttttccaccgggtaatacgcttccgcctcaatcggccctttgccgtcaataggttctcccagcgtgttcaccacccggcccagcagggagcggcccacgggcacggaaagaaggcgtccggaacatttgaccagatccccttccttcaacttggaatcatcccccagaatcacggcgccaacctcatgttcttccaggttcatcgccagccccatcaccccgccggggaactctatcatttcattgagcatgacgccgctcagcccttcgatcttggcgacgccgtcccccacggaacgaatgacgcccacgttttcctgactgacggaagccgtggctttttttatttctgcttcgagttcttgaagtatgttgctcatgggaaaaattcgttggttaattggaaagggtgcgggccatcgcagccaggcggtcgattctggaacgcacggaaccgtccttcacgtcgtcccctacctggatgcggacacccgccagcagagacggttccacctcccagcggtagtagagggcgccgccatatctggcctccagtttggcctgaatcagggaacgctcctcttccgtgaggggcacggcgctttgaatagtggctgtacggcttttcaccgcatattccaccatgccggaaaaagccttcagcagagcggcataattgcggggcttgcgttccgcaattttccgggcgatcagacacacgcggtcctccgccacggcattcccgtccatacagagccggaacagcctgcgggcggcattttgcgtgtcctttccgatcttcataaatatttcaggaatccaggctgtcgatcgcttcccggttgattctccgctggtcttcttccgtcagcatttttccggtaacctgggccgccgccagggccaccagctggccaaattgttcttttaacgcttcacgctctttctgctgttccagttccgcaagctggcgggccttttttatgatttcctcagccttccgggaggcttccgcttcctgttcttccaacaggcgggcggcggcagccttggcggcgtctattttttcctgtcccttttcccctgcttccaccagcatttcatgcgtctgttcctttacggaagccagctgccgctcactttcctcacgcatttcctctccttcttcaatacgctggcgccttttttccagaacattctggatgggtttgaacgccagataacgcaggatcaccaccatcaggatgaaagcgatcaggttggcaacaaagggttcccaactcgttaccccaaagggagcaaaaggattccaggcttggtcagctatgagattcagcataagatgagcggtttgaacatgccggaaattttccggaccggcagggaacgggcgcaccgccccggagcggagaagctccctccggggacgaaacttccgttttatttcacaaagatggaaatcagggccacgccttcaatcagggccgccaacgtgatggcaatcaccataatgggggaggaagctccggggttgcgtccggtggcttccgcggctttcgcgccaatgaggccaatgccgaggccggcgccgatggtgacgaggccgaaacctacgttgccggacagttcggccagggaggtcattgcgataggatcaatcatgttattggtatggtttatgttttttgttgaacgttcccccacaggttgcccatggtccggaacggaaagctggcggtacggtttatgaggtttttccaggcggcaggcggtccggcaagggaagttccttctcctcatttttggaaacatggccgtgggcgttatcgtcccccacctgaagtttcaggaaaatcgccgtcagaagcaggaaaaccagggcctggatgaaccccaccagcagttcgatcgccagaaacggcagtacgcacagggagctgagcacgggcccgaacatatgggccatggtgtcaataatcgtttccccggcgtaaatattgccgtaaagacgagcggccagcgcaatggggcgaatcgtgatgctcaggacatccaccagtcccacaaaaatgaagatgaacaccagcacgaatcccatgaaccccggcagtctccccttggggccgaacaggtgaataaagaagcctttcagcccctgctcccggatagaccagtaaagccacatcagcgcataaaaaatacccaggaacatcgtcacgttcatgtccgcattcgcgccgcggaacagcggcaccccatgataggtgatggttcccaccccgggaagaagccccatgtaattgctgaccagaataatggtgaaaatagttccgaagtaccagaagtacttgcgcgtcaggcgcggacccagaagggactggacaaagttgtacagagtttcaaaaaagtattccaccgcattctgtaaacgggaaggcaggatgcgcatagagcgggtggcggaccatacgaccacccctatcaaaagaaccgccagaaaaagcatcagcatcgagttggacaccgggagctcaatgcctccgggcagaggtatggaaaacaaatggggagcggcctgttccaatccgtgctccgctccttcctccgccgcacaggcgctgccgcccataacgccggacacggtcaatgccgccaaccacaggaactggaaaaatctgctcattgtctgtcttttaccattactcgtgccaactcctgtaaatactggaaaaaggaatccattccctttatttgacggttttgattgtggactctcctctttattttggcaagcccaaaactcggcacgcacacaaattatatacatttgtacataatcttgaaagaaacctggatgcccgttacaacatcaacaaaatcttttctccatcaacaaaaaagcttccgggaatccatcccggaagcctgcaggcagaactgaagggccgttacttggcggcggaaataatatggatgtggtacacgtctctgccgtccgcggccttgcgccccgtggcatgaattcccgtaacatcggaagtgattacatccagggtttccacagcattccgaagctccctgctgctttccgccgcgctcttcagggcgtcacggaccggaaccaggttaagctgaaattcgagaggggctccctgtaccggagatttcacggattccctgaggacttccataccgaaggccttcggcatactgaccgcccagcgggtatcggaaatgcttaccaccgggttcagatcggcgcccaaaggacactggtaatcgtaggtagtgatatccccgtccacagaagactggggagcgggcaactccgccattttaccctggctggccagagtgacgacggttttggcggcattagccactttctgccaggcttctcccagggcggcgcggtttttcacttcatatgcagcggagaaacgcggcgccggcacattcttgagcatgggactgggagcgccctgcatgtccataatgaacacgcctgaacccgtaaggccggaaagagcagttttataagccttccagagctcctcaatggtaggcctggccatctggatcataggggcggccatgcgcacctgatcgctcacatcatgcttcggattggaaatataggcattgccgtagtcccatacaatctgggcaatattaccgcacagggaacaacccatatccatcatctgcggattgaccgcgcaggaggaatacagcaccgtggacgcgccaggacgcacggcactcatggcggaaggagcgtccaacttgtagaattccagcggatatgtgcatgcttccacatgtaccccctgatcctgccacgagaagtaggaaacggccgtagcattccgggccagcttttcatacatgccaagcatgctggccttgatggaatccagcgccgtcatggaaggagccagatcggcaattttccaatcggcgcctatcgtctgcatcacatccttcaacccggtgagcatgcccttgtaataggccaaatccatgttaataacccctttgacggaagctttgtctgcgaacagcagcccataagccggatactggaaccgtgcatccgccatggagaaatcaggacgggacagcatggattcctggggtgaagaggcgatacggacctgtttttcaggattggtggttataaagcctaccagggtatcatccacaaaagagacggccacatacagcctggattcatccagacgaacgagcgccgccttaagacggtccatattttcccgggaaatctccatccggtctttcgcctcatccagcatttcttccagcttcgcacgcacttttttgcagtccacttccgctaccttgcaggccaggccattgtaggtcttttcatacagggaaaccattccatgcagctccatatcctcctggagattggcgtccttcaggaaagctttggcctgggcctgggcttccggcgtcagtttggcggcaatcatcacaggcgccgtcgcagcctgggaagggcgtaaatccatcagctcagcccactgcacaatcatctcggccccctggccgcccatgacctccgcccccgcaccatcggcatcctcatttccatcctttaccccctggaaaagcttgtaaacggacaaaatttccttcatctggttcaagcccatcttggtaaaagaggactgcgcgctatccagccacggagcccattcgggccccaagccgatcatcgcgtcaatgacagggctgctgaaagaacatttccgctgcacgggttcggaagcgtcttctcccggaatggctatggattcatcagcatcctccccggaggagcaggaactccaggttttcaccatgttcaaattctgaacgctcttcatgatgccgggaatatcgtaaacacccgccatcatccccatgtccctgggaaagagggcggctattccgagccgttcggcacgcttcgccaccaggtcgggagccacggaagccaaaggatcaagagaggcggcgggagtcaagccggctgcatcctgcccggccttggcggaagatgattgatgatcgtcagagcaggcggcaagagcgcaggtcagcacaaaacagggtatggagtagaaataatgctttttcattatctttaaacatggggtcatgatgccatccggcaagcgcgctgcttccttgcggcaacagcccctatcggcgcatctttcccattatacaggcgtttccccgcacgacgcaagcacaatgcaaaacattaacgcactcagggcgtgcatgacgttgctgcgtgaaaaaccttttaagcgccgccagccatccccgtatccgccagattttcctttttcccccgccaatattttccgggaaaaagccgttccggaaaccgcaaaaactctccggctttctctaagaaccggattaaagaggttccgccatgggaatatcatcctccggcaggggagactgcggcgcaggagtgtttacggaggtggaacggttaagatggcggggaatctgctggggcagtccggggatgtaatcggaatcaccccggcgcggcgtgaggggggccgcagaaggctcctccgacaacggaggcgccgacggcccggcaggccttgaggagccgcccaccggagttgccttgatttcagcatcggaagagtcatccagatcggcagggatttcatcagccttgatcggctccatcccttccggatcatacaagccgggcggcaggttgtccggcacgacggcaggcgccccgctccgttcccgaagagcggccgcagccgtttccggggtctcctccaccggttccgccaccgggatgtcatctttgggcgggtcaataatagccttgatgtcttttttctccgtttcgaaaaattcctttacgatgggagcggcggcagcacccccgcccagccgttcgtgggcgcggccttcatacagcaccacataggcaaagcgcggattgtcgcagggcatgaaaccggcgaaccacgccagacgcttgtcttcccgttccggcccccattgggccgttccggatttgccggcgatactggcataagacaggcgtgcacgcccccccgtaccggcttcaaccacttccctcatccccttgcgcacgctggacagagcacgctcataggcaggcagaggacgttgaacttcctggggcttgggcgcgtaaacgacattggcgttgccgtcctgaatctgcttgatgagctggagcctgggcagatacccgtttgccacaccggacatcatgtgcgccacctggaggggcgtaaccagcaacgtcccctggccgatggacaaattggcggcatccccggacatgaaatcgcgcttgtaattgcggatcatataatcactggtcggcaccaggccgggatcgtccggaatgggcaggccggtccgttcccccaggccgaaggcgcgggccgtatccatcagggcttccgcacccagcttcaggcccatctggtacatgaacggattgttggacatcgccagggcgcggatacagttgatatcccccaggggagtcttgctccagtttttgaacacgtggttgccgatcgtcacggaagccgggcagtaaacgagcgtattttccgtgattttgttgttcctcaaggcactggctaccgtcaggactttaaatgtggaagcggggggataacggccctggaaagcacgggcgcccagaggaccggcaggatcattgcgcaaagcatcgtaatctttctgggatatgtttggaatgaacatgttcgggtcataggacggcgtggacgccatcaccagaacttcacccgtcacgcagtccagcaccaccatggcgccgcgcctcttgccgcgggaaaggatgcgttccgcatccttctgccatttcaggttgagggtggtgacgacagccccgccgggcttggggcgtatttgcagttcatccagaattttattgccgtcttcgtcaaacatcaagcgccatacgccgggcgttccggtcagatttttgttgaattccttttccagccccgcacggccttccacctgctcccacagcggatccatgtggttgatggggccggttggcagttttcccttgaatcccacatagccgatgatatggccggcgatttccttctccggataggaacggatgtaaatgggcaacagctggaggccgcgcacacttttcaccttatccttcagcttttccgcttcctccgcacgaatgacgttcgtgagcggaagaggcagccagcggcggtgctcataatgtttccagagctgttcgtcggaaaaagaccatgcctttccggcaatttttttggcctgttccaaacagttgcgcccgaattccaccacgcgggaacggtcggggttttcaaaaatttcaaaccgcaaagccagctggtaggctacggaagtcacggccagcggttccccgttgcggtccaggatggggccgcgcggagcgggaatcagcagagccatggtcctggcggaaggccgcgtgctggtgtgcgcttcccgcgcagcgtccaaccgacctccgccaagggaaggaatcagggacagggaatccaagccattctgctccttttccgtttccctgggcatctccggagcggcggccacaccttcctgttcgccggaagccgtgtcggaatccttctttttgtcccccaggtcaaccgtttccacggcgtcatcctttccgctctgttccaccgcagcccggccagcggccgctcccccccgggaagacgggcggtgcgtggaagcctggccccaggccgtatccgccgtccacgcggccaaaccggccaacaataccagggaacgtatcagaacctttattttcatcagcttgcaggattgtggcaaatataccgcaaggaatcaacgattattcacgctcacgcttattcctgaacgatgacggttgttcccaggccgcatttgtcaaacagaatgcggcatgcctccaccggaacccggatgcacccgtgggaattggcgtcccggaacacggtgcccacatgcagccctatcccgccgtgaatgcgcatccaaagaggcattttggcgccgatgaatttaccgccgggaggcacgcgggaagaagaggtagcatccgaattcacgcacaaaccgcttgcatcaaacacgctgccgtaagaccgggaacggtaatccgcatctttttggatgatggaaaacttgccgcgcggcgtttcatgggcggatttgcccgtgcaaacgggaaagttcatagccggcttgccatcaaccaacaacacgccgcgctgatccttcagatgaatgacgattttgctgttccgcgtccccgcctggcggatacgctcgtcatgataccagatatcgcgcgtgaagcggtactggggatccgcaacaaaagcttcataggaagaagcatatctgccgtccttcatcaacggctttccatgaggcgtcctgggcgtggaggaacaggcagccagcagcagggaaacacacaggaaaagaagaaacgggagagcggcgtgcggcatgcggcctgctttaccctcttcccccgtggaaatcaagcacgattcccctccgttccggcatgtttggagtaatcctgataaagacgcccgtttatgcccgtatctgtttccgttctttctctctgccgtcatgaatgccgcttcttccgttcccacccgttctccccgcctgcactccctggacgccctgcgcgggctggacatgctcattatcctggggctggacgccctgattctgcttctggcctccagaaatccgggaaacggcttcctgcaagaagccgcgcgccagatgacccatgcccgttgggaaggattacacctgtacgatctggtatttcccgtctttgtattcatatcgggcgcctccatgtccttctccctggcgaaatacaccggcacctccatcgcccccggactcgtccatctctggaaacgggctttcggcctggcttttctgggccttctggtcaacggaacgcttacctggacggaaagcatgcgttacgcctccgttctgggactgatcggtttttcctgcgccattgcaggaacctgcatcctgctgtgccgccggacgggggcggttgcctcagcagcgggattcatcctgatcctcattaccctgcttcagttcacctgcggcaattttacgccggacggctccgtcaactcatgggtggacaggcactggctccccggccgtctgcatgggggtgtttttgacccggaaggcccgctctgcgtcgtttccgcctccgccctgtgcatgggaggatggatagcgggaaagtttttgaaagaaagccggctcccccccatgcgcctctgcacggcaatggcaggagcgggccttctccttttctgcaccgccaggatgctggacggcacctaccccatcattaaaagcatgtggacggggaccttcgtcctggctgccgccggcatttccctgacgtttctttccctgtttcatctggccgttgatgtgtggaacgaagggaaatgggcccaatgggcatttcccctccgcgttatcggcataaacgccctggccgcctacctcatccactccctgctcaatgtgcatgaacttaaccgtcgcatcttcagcggcatggcagacctcttccccccgttccagcccgtcttccttgccgtgtcccttctgctgctgcaatggctggccttgctcttccttgacaggcggcgactgcctttcatcaaaaaagcggtcaaatgaccaagcggcggataccccggccatggttgccggtgctccccgaaaaaacggatactcccctgtgaaacggccggccaacattatctctttcccccaaagtcctaaaaggagaaataaagcggaaacatcattttttgctcgtttcagggaaaagctctgccaccctttccggaaagaggccaagcacgttccttccatgattgtcttccggttcccctgccccatttcctaaccccataatcattccatgaaagcattcatgttcccagcccttgttctggcggccctgaacatatggactggcgccgcccagccccggacaaccgccattttacctgtaccgggcgaaaaggcgtgccggcttccgcttcctccctaccaggccttttgctggttttcagcggaccgcggccgctggcccggagacggcaaccgggttctgccctggttcggaaggacggcccccggcaacctgctggacagcaagccgaatcccagcaccgccaaaccgggggaccatgccatgttcgccctgttccacctcaaagacggcaatttcatggccgtgctccccgtcgccgcccctgattccctcgcgtggctgaaacttgaaagggacggaacattccttgtggaagccggttcgctgggaacttcccccgccaaaccgcaggccgtcctggccgtcaccgccacggacaaggatatttaccgcgcctgttccgccgtatgggacaaggccctttccctccctttcatcaagggcagaaccttgccccgggaaaagaaaatttatccggaaccgttcaagtacctcggctggtgcagctgggaacagtataaaaagaacatttcctccaagctgcttgaagaaacggccagaaaactggaggcatcccccgtccccgtccggtggatgctggtggacgatggattccagacccaggaaaggcttcagctggtcagtttccagccccggcaggatcaattcccccggggctggcagcccctgatgaaacacaaaagccccaaattgaaatggatgggcctgtggcactgctattacggcctctggaacggcatccaccccaggcaccgtctggatgacgagactgcccgcggtctggtccgtaccgccaaagggaaaatcctccccggtgacggctccagaggagccggagcgttttatacccccttcctgcaatccgtcaaagacgccggattcgacttcgtgaaaattgatgtgcaggcggaatacctgaagcatgcggacgggctggacaacccggtccgccacaataccaagtgctcggaagccctggaacaggcctgcctgaaaacagggctcagcctggtcaactgcatggcgcagggtaccgtcaacattcagaacacgcgttacagcgcggtcacccggtgcagcattgactacaagctgggagatgaagccatggccaaatcccacatcctccagtcctacgccaataccctctggctgggacagaccgtgtggccggaccatgacatgttccattcctcggatcccgcctgcgcccgcctcatggccgtatccaaagccgtttcaggcggccctgtctatctttcagacccggcagacaaacttaatccggaaaacatcatgcctctcgtctggtcggacggtcttctgctgcgcccgctggctcccgccgtgcccctgcctgattccgtctttccggatgctctgaacgagaaccgcctgtaccgggtaatcgcccctttgcccggtcaaagcgccgccgtggtggtgtacaacctcaaacatccttccccggcggaaccggtacgggggaaaatttccctggaggattataaaaacgcggcggctctgctgaatggcaatgcggcggaagcctacgcctctctcccggcggagggcatcgccgcctattccgcagagggaggccgcgcgctgactccggcacagccggatctggatgtagagctgacgggattcaaggaccgcctgttcatcatggcccctatcgtccaaggctgggccgtcatcggcaggagggacaaatttctctctccctgcgccctggtttccgttccggggtacagggagaacggcctccgcttccgcgtgaaggaatccgggcctgtcgtcatctggcggggaaaaggcccggtcaaagcgggaaacacccccgtcaggaatctggggaacgggttttatgaattgcaatttcccgtctccgaccaccccctggacatcactgtaacagcggaataactccggacatttactctcatttttcctacttcgtctcccatgaacccgcttcatcccctccttgctttctctctgttgcttccgctctgccggcattccatggcttccgacgcagctccgactgccattcccgcgccgaagcccgaggctccaaggcaggcgattgaacaattcctggggcttaccgccatctggatgctggaaatggaatggacccacgcctatgccaataaaacgcccaaggcggaggatttccggaatgccatgctggcggcgggccttcagcaatgccccgcggactttcaggaagcatggctgcggcaaacggccaggccgggccgcaattatgcggctcatcggggcaacgaaaaaagaaaaccgccacaatcatcacggtgactgtaacggtttgtttgtgtgcttggtgtagcagttccattccgtgcagggtgacacggaaattacgccgtgcggaaattccttagatcattaaggcattttccgagccatattgacaagccaactctgaaaatatccaaaatgagccaaagaagataccccctttgggaaccccttactccctcattattccatcatctccgatatgaatatggaaacgacatattcggcgatttcgcaatcctgcgcttcagtacccccaccaacgccgattgctcctacaatctttccgttgacaaaaagaggatagcctccggaaacgagagttatgcgagggtcgttggtctgtattgccataagcggctgcccttcggctgcgtattttgccacatcctttgtcgtgcattgggtcacggcagacgtataggctttgcccggtacaagtgttgtgcttagcacaagtgcgtcactgaaacgacggaacactctcggcaagccgctcggatcggctattgcaaaactgatttcaacgcccagttcctgacttttctcgcgtgcggctgcacacaggcggtcgcataggtcatcggaaaggactcccgactgagtgatgggattttttgctgtcattgtggtaaagattgcaagcagcatgaatgctgcggttaatattgctctaatgcaccgcaaaattaccaacaatgcgtgtaatccacaatgagtgacaattttatcaccgtatgataattttatcacctcgccggaatttgttaattttgcaactaaatgaccgggaacagccatgtatgagcataagataccaccgatagacctcgattgcggcgttaccatgaccctccatgtgattggagggaaatggaagccatacctcattaactgcattaccaaaggatttcaccaacctaaggaatttcagaaaataatcaccggagccacaaagagggttcttgtgaaacaactcggagaactcgagattgccggagtggtgcgaaaagtcacctatgacacagtgccaatgaaaaccgaatacttcctgaccgaattgggagaatcccttgtgcctattatccgaatgattgacaaatggggtttggaacataaagccctgttcaatgaaatgggattgctcagcaatgcacaatttgtcacgaatgagccaaaggaatcgaccctttgaaaacccttgcaaccataaacaaggctgtttgcttgataagccaattgtgtaagttcacaccaaaatattaactttgtattactcaaataaaatctcttatggaaaataatattcagaaaagccagaatagaggagatggaggagatctataatctctatgtggaacgcataaagtggatggacgaaaatggaattagaggatggaataccaccaattatcttgcaagatatccattaatcatattaccgtagaaggattgagtcagaccaattgtatgtgctgcgtgaagttgggtcaggcaaactgatgtgtgcagtagttcttttggatactgacgagcgttggaatggcaaacccgatataccggcatactatgttcataatctcggcacaaagcccggaataaaaggagcaattggcaaaaaaatggcaaacatagcatacggcttgattgctcaatacatagttccatactaaacaattactatgctttacacggatacgagaatgttggtatgtgctacgacaaatcttatgagggatatttgcgtgaaaaactcctgtaacatattccaagagtgattttatttttgttgttataattgtagcgatagaatttgaatcatattacatcacaaaaccgattgagccgaggcggttgacagcctccatcttctgcttgtcaaggacgcgcaggtatttctcggtggtggatattccgcaatgccccatgagggtcttcagccgcctacgccgcagatgtaggacgccttccaccgggacatgcgggaaatccgggaaaacatgctgggaggcagataggaaacagcctttttgcatgcaacgccttccgggaaccttcccggatatcaggccaaggtcaccccagcagcccggtgtccattccttcgttatattcccaaattccctgctccaccataaacgcgctccagctattgagcagttgttcaaaataggcggcattcacattgaaatggtaaaatgtgtgatccgccacgtccagaagttcaaatcgggaacggttcttcttttttctccacagctccgccagcctctcgctgttgcgccacggcagaagcctgtcccttcctccatgactcgcaaacaggggaggcagccccctctgcacgcgccgcagggggttgacggcatccctctggtccggaggcatcatgccgcccagcttaaaagcggattgcgccgtcaggtcgcacacgcctcggaacagggccacggcggcggggccgggaggaaggggagcctttttgcggaacagggaccagcgggcgggatgatccggaagggccacatgcagagccatcagccctccggcatcacttcccgccacagtaatgcgggccggatccagccccagcaaagcggcgttcccatgcagccaggcccaggcttccctgccctcttccagaatgtccatcggctccacttcataatcgccgcgtgtgcggaacatgggtataatgcctgcaataccctgctgggcaagatggagcgcccacggcacaaaatcccccaggctcttgcccacccacatgccgccgtggaaaaagagcacggaaggagcagcggcttccgcccggtggccggggggaaaaaagacatacgccatcagctcctctccgtctgaaaaccgcctccacacaaagccgggctgttcccgcaacagtttcctgtaccgggcttccgccaaatgatcggcttccgtgaacaattccataagaacggcttcatgatgcaattgtgttgcactccgcgcaagtttgatgtctaaataatcgtgtaatgactttccgttccattttctccctggcctgctgcgccgcagcccttctttctcccgcttccgcagccccccgccccggagacgccaaactgagagacgacctggacgtggcttataatacatggcgtctgcatctgctgcgcggcaattatgacggctggagagccacaacctccgcctaccgccaggtgaaagtgcgcaatctggccgtctcggaaaaacgcccctttcccgcttccctgttccggcagcccatggcacctcctgcgctcgctccgctgatgtacgtaggttccgtcgtaaacggccccacggccgcagccacctactacggcaaggtggatctggggctgggccaggaacccacggattcgaacgccctggtgctgctgttcactcatgaaaacggcaaatggaaatatgaccaggcgcgctttttcaacctcacccgcctgcccgccgtcaaagaacgcctcaaacgcggagacgcctccgtgctgatggagcaggacgggttccagccccttgggaaaattcccgccgtgccgcctgtctgcccgccgcccaaatacatcgcaaaaattctggtggactgtcccggtcgcaccgtccaggctaacgtcaacaatatttccctgcatgaatttgacaacacccgcctggcggaagtcatttccggaggactgagggacgggaccaactcactcacactgaacttttccgacagcccgaacggcaaaaaaggcgccgtactcgtggaagtgtacatcatgccggaaatcccgggccacctgcccgccagggctttttcctacttcgtccccccccaggcacaacctaaaagcggccctgtgctgattaacgtcactccggaattgctgaagaccatggagccgaagaattcttccccgaaggcagccgccggcaaataaaatcgtcattcttcaacgtttccgttgcgggcccggtcataccgccatatgacaactcaacctcaagtcagcagctccgcggtatccggcaactcatggtggatgggaatccttggcgtcatcgagctatttcttggcttcatcgccttggcctctccctggatcgtcggagccagcttcatttgggtaatcggcatcatgctgatggttctggccgtcgtccggctgatccaggtcttcaccgtcccttcctcccgtgggtggaacctggtgacggccatcctgtacggcatcgccggctggtttctgttccgggaccccaatatttccctggctatcaccacgctcatcatcgggtggggcctggttattgccgccgtatttcagggagccatctggcttcaaacccgttccctgcctgccagcgggtggcggctgttcaacgtgatcatcacgctgatcctgggcctcatggtcatcttcggctggcctgaatccacggcctggttcgtaggtactctgattgcagtggaactgatcttctccgggtggacgctgctcctgtatgcattcagcggcaattccgcccgccgttaatcccagtgacaacaatgaccctcacccaggaagaaaccgaacggtacgccaggcatctttcccttccggaactgggagaacagggccaatacaaactcaaacgggcgcatgtcgccctgacgggcctcggggggcttggctccccggcggccctttatcttgctgccgcaggcgtggggcgcctgaccctgattgacccggacgaggtgtgtctctccaacctccagcggcaaatcctgcatgccacggatgcggcgggaacggctaaaaccgccagtgccgccagacgcctgtacgccctgaacccctccgtacgcatcaacacggtgcacaggcgccttacgccggaaaatgccgtttccctgctggaagggtgcgacctggttctggacgcttcagacaattacgcggcacgcttcgccatggcggatgccgcctgcaccctgcgcattccgctggtgtacggcgccgtgaagggctttatcgggcaggtggccgttttcgccccccatcagggaaccgcctgttaccgctgcctcttcccggcagatacgcccatgcaggaaaaagacaccgcctccgccgcaggcattctgggtgcgcatgcgggcatcatcggctgcatccaggccatggaagccctgaaatatcttgcgggcattccctctccgctggtgggcgccatgctctctgcggacacgcggcgcatgcgcttcaccaccatccctctggcgcctaatcccgcgtgcagatgccggactaacgaggggtgcggagccgcaatgaaaaattgacggcgacggcggcatctggcatcatttccggcaggtatgaatcatttaacacgcgccaaatccgtttttgaaatggagattgaagagctgcgcggcgtcctgtcccggctggacgacaatttcaacaaggccgtgcacctcatgtcccaggctctggaccgcggcaacaagatcgtcattgtaggcgtaggcaaatccggcaacatcggggccaagatcgtcgctaccctgaactctacgggaacgcccaccgttttgctggattccctgaacgccctgcacggggatctgggcatcgtccaggacggggacgtctgcattgccatgtctttctccggagaaacttcggagctgctgaccctgctccccttcatcaagcgttttgaactgcccatcatttccatgacgggcaacacgggctcatccctggccaaatactcggatatcgttctggacacaggcgtttcccgggaagcctgcccgctgaacctggcccctacttccagcaccacggccatgctcgtcatgggagacgccctcgccatggccctggtggaagcgcgccacttcaccgcgcgggatttcgccaaacgccaccccggcggttcgctggggcgtgccctgctcacccgggtgagcgatatcatgcgccgtggagaagaaatggccatgcttccggaaaccgcctccgtgaacgactgcctgaaggcgatgaccacagcccacgccggcgcctgcgtcctgctgacggagggccgcaagctggccggcatcttcacccacggagactttgtccgggcatacggggcgaaccctctcatcggagaacagcccgtcagcgggttcatgacccgcaatcccatttatgtcatggaagacgacctggccgctgaagcggcgaaggccgtgagcaaccgccatattgacgatctggtggtgctcaacgcggaaatggcccccgtgggcatcattgacctccaggaccttgccaggctgaaactggtttaaaccctccctttcccattcttttcaggcatccgtgattcaaaagtaacaaatcaatcacggatgcctttttcattgaacggaagcttccgtttccacaatcttattttcataaacatgttcctgaaatttaccaccgccctgcttgcctgcacctggggcttttcctgcgcacaggacatctccggcccggaggaagataccaatgcccccgctgcggaggaagccacgcgggaagtccctcttccggacgggaaaacggttcccaaatttgaacccctggatgagcaccgcatcaaaatcggcaatgtgattgtcaaccataaggagcgcaccgtcagttttcaggctcaagtcaacatgaaggaaggaattctggaatacgtctgctgcatgcccaacggcaagctgcatgaatccctgctggtgacggaggcggatcccctgcacatcagcctgggaatgacgctgctcaaattccaccgctttgaaaaattctttccggtgcgggatgaaaattttgaatggcttcccttcacggaacccaagccggaggactacgcagactcctacgtgcagattgtcatgacctatacggaaaacggcagggaacagaagagcgatttttccgacatcgtcgtgaactcacaaacgcggaagggactgaatcccagcgactggctttacaccaattccttcttttacgaaggcgcctaccaggccagcctgagcggagaagtaatctccatcttcgccagccgcacctcccccatcaattacatcggagacttccatgacggcgtcaacgatacaggctggatcgtcaacccccaaaaaaacctgcctctgggcacaaacgtcactgtcaccatttcccagaaaccggttcaacccaagcaatagcatcctatgttcaaatccgtactttcactaacgctggccgccgcactgggcacagcctccttcgggcagaccaccctgacggccattcccggagaagcggcagccgccaaatacgcctccattagccaggaaattctgcgtgccattgaaaaagggaacgaatacctgaaaagcaaacaaaatccggaaggttactgggcccagccgtcctaccctgccctgacagccctggcggtcaccgcctacatgcgggaccccgccaaccaggggaaacccgtcccggaatacatccggaaggggtatgacttcatcctgaaatcccagaaggaagacggctccattttcaaccgcggcatgtcctcctacaatactgccgtgtgcatgatggccctgctggccgccaacaaggaggaatatgcccccgccattctcaagggccgcgcctacctcatcaagcagcagaaccactttgccccggacaacccttataacggcggcatcggctacggcgacaagcaggctcctcccattgcagacctctccaatacctccctggcgctggaagccatttactactcccagaaactcgccaaagacggcaagtacggtgaacagccggatctggactggaacgccgccacggaattcatcaaccgttgccagcaaaaccctgccgtaaacaaggaaccctgggtttccaatgacaaatcccagctcggcggcttcgtgtaccgtcccggcgtctccagcgccagggacaaaaaaagcgccgcctttgacaaagcggagccccccaaagcttacggcagcatgacgtatgcgggcatgcagtcccttatttacgccaatgtggataaaaacgacccccgcgtcaagctggccctcaagtggctggaaaacagctacagcctggacgaaaaccccggcatgggcgttcaggggctttactactactatcaggctatgtccaaggcgctcagcgccatgggaatagataccctgacgctggaaaacggccgcaaggtggactggcgggatgaactggccaacaagctcatttccatccagaagagcgacggttcctgggtgaacaccaacaaccgctggtgggaggcggaccccgtcctggtgacctcctactgcgtgctggcgctggaacagctctaccactccattccccggtaacggactgccatgctgatttcccgggccggaaggggaggcaatgacctccttttccgtacccggaaatgaacgccccatgaaatagaagggtcttttcttcaatcacttcaaattcatggacaccattgattccattaccattattgcagcggcatggggcctgctggttctccggctgacgctggcttttatcctgtggccgcacgggacccagaaagtgctgggctggttcgggggcgcgggctgggagggcacctaccgggccttcacggaaaaaatgggcatcccccccttcctggccaaggtggccatgctgacggaatttttcgcccctatctgcctggtactgggcgtattcaccagaatagcggctctcagcgttatcatcctcatggccgtagccataaccaaacacgtcaaaaacggctacttctccaactgatccggcaaaaaagccggggaaggcgtagaattccacctgctttatgcgggctccgctttcgccctgttcctgacaggccccggcccttggtccgtggacgcctggtgcatgaacatcgtgcatgtcatctttggttgacggcggcagacagcacacggaagggcatagaacatactttccgattctcaaacccgccgtattctggtatttatggaaaggctttcttttgcctcgttaaccctttccgtcatgaccagccataaacgcttaaaactccggcagtgcaccaactgcgaatgcgtcattaacggagtatgggaatgggtggaagaatgcgcccgcggcgcagcggcggaagaacccgccatgcgcggtattctggatgacgtctgcctgtctcgcaattccctagccacttccatctcggcgcggctggcccgcaagctctcccgccgtgacatgccgcgggagctgattgagccccttatccgggaagcattgacggaagaccagaacatcctcagccaaatcgcccaggacctgatcgccatcgtggaccgggatcccgcctgccgtacgccgctggaacccctgcttttttacaagggattccacgccatcaccacgtaccgcatctcccactggctgtggcagcatgaccggacaatcatggcccttcagttccagagcctggccagtgaagtatttgcggtggacatccatccggcggccaccatcggctgcggcatcctgctggaccacgccaccagtttcgtggtaggggaaaccgccatcatccgggacaacgtctccatcctgcatgaagtcacgctgggtggcacgggcaaggaagaaggggaccgccatcccatcgtggaatccggagttcttatcggcgcgggggctaaaatactggggcgcgtcaccattggcgcctgcgccaaaatcgcagccagctccgtcgttctggaaaatgtcccccctcataccacggtagcgggcgtacccgccgttatcgtcaacgattccattccggacaatcccgcgctggacatgaaccagtgcctttgcgactgaaccggcaacagattgggaagccatcaattacggcagaaaacaggttgaatccgcaactccgccaaaatcagcggaaaaggcaagccttaaaaagaccggacttgatacaatagtttcaaccccaacgcgcctgtatttataaatactgatttttaatacttgaagcaaatccgaatcctaattggccaatctgacgggccgcgcctgttcaggcacggctttcccccggaattcgggacggctccttcagctgcccgtttccttcaataacatacttgtaggaagtcagttcgcgcagggccatgggactccgggcatgaaacttgtccgtgccgatgcctatctccgccccgaagccgaattcctccccgtcgctgaaccgcgtggagcaattatggtaaacgcaggcgctgtccacccggttcataaaataatcgcgtgcccgtttatcctccgtaatgatggaatcactgtggtgggacccgtagcggttaatgtgttccacggcatcccggacgccgtccaccaccttgacggacaaaatgaggtcttcatattccgtggaccaatccctttcttccgccggaacggcctcctgaccaaaaaacgggcggctccgttcacacacgcggcattccacgccacgcatgcgcatgcgttccgccgccataggcaaaaaccgctctgccgcggcagcatccaccagcagggtttccaccgcgttacaaacgccgggcctctgcgttttggcatcgtccagcacgttcacggccatctctaaatccgccgccgcatccacatacacatggcaaatgccgtccagatgtttcaacacgggaactttggagaattccgtcacggcgcggatcaaccctttccctcccctgggaataattacattcaagcaggaatccagctcgcacaactgccgcacctcatcccggctgccggaatccagaagccgcacggcatccgcgggaacagcggatttctccagcgcgctgcgaagagtctccgccagcacccggttggtccgcagggactcgctcccgccgcgcagaatgacggcattcccggacttcaggcacaaggcggcggcatcgcaggtgacggtccctcggctctcataaataaagccaatgacccccaggggaacgcgcacctggcggatacgcaggccgttggggcgtgtccattcccggatgcactctcccacggggtcgggaagggctgctacctgctctatgccgcaggccatgtgttctacccggtccggcgtcagcagaagcctgtccagaaacgcggaattccggccactcttccgggcctcttccatatcaaggacattctcccggataattttctctgcggcgttccgcactcctgcggccatcagccgcagggcctgagccttctcttccggctccagggcaagcatctcccgtgaagccgccagagcggcccgccccgccggttcaagaggattttccatcttcatgacttcctcctttcggcacaaaatacgttccggctccttcctcccttccctccagcagcagcgcaatgcgttccggatggcggccatgcagcatgtaaacgcccgttcccgcattcacggcttcccgtatggcctgtaatttggcgcccatgcctcccatggaaaagcggccccggtcctcctcagcgaatgccagtacggcatccacatcctccacccgggaaatgatggcctcccgccttcctccggggggatacaggccgtccacgctcgtcaggataaacagagcgtcggcctccaccaggcgggccatatgcacggacaggatatcgttgtccccaaacttcagctcctccacggatacggtatcattctcattgacaatcgggataatgcctccgtgctcaaacaggcgcaacaccgtggcctgcacgttgcggcggcggagtttcaaatcctccgccgtcagcaggagctgggccacatccacgttaaagtggttgaaaagattttcatatgcctgcatcagccgcgtctgccccacggccgcgcacgcctgtttcaaggacagttcctgaggataggacggaagacccaggacggacacgccggcccctacagcgccggagctgaccagaaccacctggtggccctgctgcatgagtcccgccaggacgctcaccaaatgcacaatggaagaaccgtccaatgtcccattctcacgggttaacacgcccgtacctactttaattacgattttcatgtatctccgccgttcatgatacaacaatccctttttccacagaaagcagaaaacgcgtcctttccgcgctaccccgtgaaagcgccggccgtaaaaaatggaaggaattcccccttcttactccataaggataaaaaagataatttcctccgcccgaccggctccggcgcggataaaatccgccatcccggccaatatctggacagccatgaaaaccaggggaggacaacaccggggaaaaggactggagcaggccgtgcgacatgtttccccccggctttattccctaaagctccatgcatgccggtgagcgtgccgcaaaaccgggaacggcatgcgcggcgcttccatcttcaatgcttttccccgatccggaactggtgccggagacgcattttaggcttccaatatgaagctgatccgctcatattgcccgggcatgaatcttgaccttctccaaaaagccgccaaccaggcgcggggactcgccatggatgccgttcacgactgtgcatccggccacctgggcctgccgctggggtgcgccgaaatcggggccgtcctgttcggcgatttgctcaacatctgcccttcgcagccccgctggctcaaccgtgaccgcttcattctttccgccggacacggctccatgtttctttacggctggctccacctgtcaggattcaacattggcattgaagatatcaagaatttccgccgcaaaggttccatcacgcccggccacccggaattccgggatacggagggtgtagaatgcaccacgggaccgttgggccagggcattgcgaacgccgtaggcttcgccctctccgccaggcgcgcggctgcccggttcaacaggcccggcatggatatcttcacccagcacgtcttctgcctcacgggagacggctgcctgcaggaaggcgtcgcccgggaatccctcgccctggccgccgtgctcaagctggataaccttattctcatttacgattccaacgacatcacgctggacgctcccgcggaacgtacccagctcacggatccgcgcgccgtatacgaagccctgggctgggatgtgcgccagattgacgggcacgatatcagggccattgagtctgcggttgaagccgccaaaaacgccaaaaacgggaaaccccagctcatcattgccaaaacggtcatcggcaagggcattcccggcattgaaggcaccacaaaaggccatggggaaggcggagccaagcttcaggaagaagcgcacgccaactggggaattcctgccggagaacgctattacgtctccgaagacgtccgtaccgctttcgcagacctgaaagcccaacgggaaaaagatttcaatgcctggaacgccatgtacgaacaatggcgccgggcttatccggaactggcagaggaactggacgcaggcatcaacgcctgctcctgcggcgtcaatcccgcagactcggacaaggcaattccgcccttcccgcaggactatggcgatgctacccgttcggccggagccgttgccatcaacgccatcgctaaagcgaatccctgcttcctgaccaccagcgcagacctttacagctccaataaaaactacctttccggcgcaggagacttctctgcggaaaccccggaagggcgtaacttctggttcggcatccgcgaacacgccatggccgccatctgcaacggcattgcctacgacggcctgttccgcgtaagcgccgccactttctgcgtcttcgtagactacatgcgcgcctccatccgtgtagccgccctcagcggactccccgtcacctatattctgacgcatgactccgtagccgtgggagaagacggccccacccaccagccggtggaaacaatttccggcctccgtgtcattccgaacctggatgtcatccgcccggcggacccggaagaaaccgcaggagcctggatggccgccatgcagcgtgccgacggccctaccgccctcatcctgacccgtcagaaagtggttacgctgaacggaatccccgttgaaacgcgccgggaaggcgtgctgaaaggcgcctacatcgcccggaaagaacagggcgccttgaaagccattattcttgccagcggttccgaactggaactggctctgaaagcggcggaaaaaataggggaaggaatccgggtcgtctccatgccaagcttctgccgctttgacgcgcagcctgccgaataccgggaaagcgtgcttccctcctcctgcatgaggagagtttccgtagaagccggagtcacggacctctggtggaaatatctgggctgccagggggaagccgtgggcatcaaccgtttcggcttctccgctcccggaacacaggtgctggaagaactcggcatgaatgtggacaacgtcgttgccgccgtccacaaggttctggccaaataaacagggaatatttcccctcatctcctttcaggggctgttccgcatccgccgggacagcccctttttcatgcctccccggttgccaggaaaaaggcaaggccgttttcacgaaacaccagtatccgtaacgcaggaactatatcctttcccgtggaaattccgttcgtttcccgtccggatttctctaaatacaagacctccgcacatcagctccattgtccgaaccggacccggatgggactcaggccgcaaaagccccggttgcaagcagcccgttttcatctcagctgccggaacggataatttcaggtttccttcatggcgccgataaatatgcggggcggccatgatcaagcgccgcctctatcgacgatgcgatgaaccctaaacccgcaaaataacgagggtccggcccatcaacaatgaaaaaccgcccctttccgaaaaaaggggcggttttaaagaccttggcgacaagggaagcggctcctttagaaagcggcttcaatcttcgtaatggtatacacctttttcttgtcgccgtccatcgggacaatcttcacctggtcccctacacttttgcccgtcagctccttgccgacctgggaaagataggagacgatatgcttttccggatttgtgtcccacgcgcccagaatggtgtacaccacgggctcctcgccattcaacggctgaagagtcaccttcgttcccatggcggcgcgggaggtatccgtcacggcaaagtccgtgccgcgggccagggccagcgcatgttccagttccgcccggcggcggttgagcaccttctccacttccttggcatcctggtagccgccgttttcgcggagatccccctccgcacgggaaatcttcttgttatgcaggttttccggaattttcacgtttaccagttcttccagctccttcttgcgggcctccaggctttcccaggaaacgaaaatcggttccggtttgtcggagttgtccaccagggcgtccagcacaatggcgtgcaggtccgggaatacgctgatgatgcgggccatcagcgcgccgcggtcctgttcggagaaagcggaggtgttgtacagcatcttggcaaactggcggacttccgccacatcctgccccttgatcatttcctggatgatgctcttatcctccatgaacaggttcttcaggcgcagcatgcggttggggccgccgtccatgtggtcctgttcaatcagggaaagcatcgcaatgcccacagggaggccaaaaagaggcttggaagcgtcatgccgctggcggcatatccagatgagggactccgccggaagggtctggcgcagcaattcatgcttcaaatgcttgaccagcaccttgtcctgcccttcttctatcaggaatttggcgatttcccccacggcgcgggcgccgcctgcatcaaaaagctccagcgccttctgcggccaatcctccccaaagatggcgggcagcgtggcatacacgcgcttctgccgcacggcaggcatggaattgagcacttccgcgaagcggcccacatcgccgatattggcttccacgatggaacgaaggggataagcttccttggccgcctccgtatttttaaggggggcaatcaggtcatccctgagcacggccagctccagcacctgctggagagccaggctgccgccgttgcgcacatcggcatccacggcacgaatcagggcattgacggcatccggctctgccatgaccgcttccattttgatgccgtccagcacgcgcaccttggctttcaggtcggcggccttattgtaatcttccagagccgcctgcgcgcgggaaaggatattcgcgcgaagcgtgatgcgttcgcccttgcgggtgggcatcatgaactggacattggaacggagcatggcgcgcaccttgtcccaccagcctttccacttgtccgccgcaattacggtgcctttcagcgcggcttccagcttctccggagtaagggaattaccgtagccctgcaaggtaacgcgcaccagttccaccgggtcatccacggacaggttgatcagggattcggtatcttcataccgcttggccaggaaatggtcgtcactgatgaactccaaaattctgggagcgaattccagggcaacttcgtgttccggattttcctcaaaatcaatgaccagctttttggcggggagattccaggaaatgacttttccggcgccccaggaagcatggaagcagtaacggccaggtgcgatgcgatcaagtttttcggcgagagagggggtaattttccccagagacaataatttctccaagtcggcgtgcatactaaagcacatgatacgcccccccctaccggtatcaagactaatttccctcttccgtccggaggcgtcccgaacggctttccaaagccgccacggagacagcgtccgtccgcgtcatgctccgacttcgcattcgggtttcgctttttttcccctcccctcctccatccagttgcggcttgaccgtgcggggcgtctggcgtaacatctccgcacgcattcaacccctgcgcaacacgtatcatggaacctatttacgaagggaaggccaaacgcctttatacgactgacaatcccaacgtcctccgcatggaatacaaggacgacgccactgccggaaacggagccaagaaggcccagtttgaaaacaagggcaggatgaataaggccatcaccctggtcatctaccgcatgctggaaagcaagggcgtgaaaacccacctggttgcggacgtggacgacatcaacattgacgtaaaaaaggtttccatccttcctctggaagtgatcgtgcgcaacatcgccgccggctccttcagccgccgcatgggcgtcaaggaaggcacccctttcaagaagccgatcgtggaattctcctacaaggacgacagcctgggcgaccccttcattaatgatgactacgcccgggaaatgaacgccgctacggaagaggaatgcgtcttcctgaagaatcaggcccgcatcgtgaatgacgtgctgattgactttttcaaacaggtcggccttacactggtggacttcaaaatcgagttcggacgcttggcggaagatccctcccaaatcgtgctggcagatgaaatttccccggatacctgccgcctgtgggacatcaagaccggcgagaagatggacaaggaccgcttccgccagggcctcggcaacgtgatggaagcctacgaagaagtcctttcccggctccagaacaaggcttgagcctcttcccccttcccatgggagccggtcttccgccggcccccatttttcattttaccacactcttgagcgatatgaccctccactttgaagttatcagccggttccaggccgccgccaatgcggacgccctgctctatacccccctgaacgccggcctcactttccgccgcagccgcgtttacactgtagaaatcaccggggacggacaaaaagcccgcgaatacctcctgagtgtgctggtggaccccatttcccaggaatgcacggaacagaacgcgcccatcctggaaggcgccctgttcacgattgactacggcatgaaagccggcgccctggatctggaaaaagaagccatcctgcaaaactaccgcgggcgccggaatatgggctttactatggacggcctgaaaatcacccagcgcgtgtacgtcttcggccagggagacaaggaaacgctggcggcgcgctttgccaaggacgtctgcaaccccgccattcacaactggaccatcgcctaacccttttcctttcccatccacatgtccgccaaaacctaccgaaccgttcccgtaaggaacctgagcagcgacgaactgcttgaactcagcaagaaacagaagctttccctgtcccgtgaagacatggaagtcgtccagcagattttccgggaaatcgaccgcgaccccactgacgtggagttggaagtaatcgcccagacgtggtcggaacactgcaaacaccgcatcttctccgcctctatcagccacagcgtcaacggcggcgcaccggagacggtgaacagcctgttcaagacctacatcaagaagccttccgaaaagatcatggaacgcaagccgggcttcgtgctcagcgcgtttgacgacaatgccggcttcatcgccctggacgacaacctggccgtctgcctgaaggcggaaacgcacaaccacccctccgccattgaaccgtacgcgggagccaacaccgggctgggcggcgttatccgcgacatcctgggcgcaggcaagggagccaagcccatcgcctccctggatgtcttctgcttcggcgctccggacacgaatccggcagacatcaccgccccggacgtcatccaccccctgggcatcatgcgcggcgtggtgcgcggcgtgcgcgactacggcaaccgcatgggcattcccaccgtcaacggcgccatccagtttgaccccacgtacatttacaaccccctcgtcttctgcggcaccgccggcgtgattccgcgcggcgacatcctgaaggaaatgcgtcccggcctcaaggtcatcgtcatcggcgggcgcacgggacgggacggcctcaagggagccacgttctcttccgccgctctggatgaagcctcccatgaggaagacttcaccgccgtgcaaatcggtaacccgattgaagagaagaaaacgctggacttcattctggaagcgcgcgaacgcggcctcatcgtctttattacggactgcggcgccggcggcttctcttccgccgccggggaaatgctctccgtcacgggcggtgaaattttcctggacaacgcccctctcaaggaaccgggcctcatctcctgggaaatcttcctgtcggaatcccaggaacgcatggttatggccgtggaggaaaaagaccttccggaactccggaagctggcagacaccttccagacggaactgaccgtcctgggccattccgacgatacgggaatcctgaaggtctggcacaagggggaactcgtctgctgcctggacaactccaagctgcatgacgcccccatcaagaagctggaatccgtattcactcccggcaaggcactcacgggccagcccctcccggacaaggatctgaacaaatccctggaaaccgttatgggggatttcgccatcgtttcccgggaacccatcatccgcgagtatgaccacgaggtgcagggtaacaccatcctgaagcccctggcgggcgcccaggcggacgctccgcaggacggctccgtggtggacatcgacggctcggacaaatgcatggccatggcttgcgccattcttccggaatggggcaaaacggatccctacgccatgggtaccggcaccgtggatgaatgtgtgcgccagctcatcctggttggctccaacccggacaaaatcggcctgctggacaacttctgcatgggtaatccggaagatccggcggaactcggccgcctggtggaatgcgtgaaagccatcgccaaggcggcggacgcgtacaatgcccccttcatttccggcaaggactccttctacaactattttgaaacggaagacggccctatcaacgtgcccgtcaccttcctctgctccggctttggtgtggtggaaaacccggactacgtcatcggttcttccctgaggcggagcaacagcctgctgtacctcatcggccatacggaagatgaaatgggcggttccgtcttcgcccgcacccacggggtggaaaacggcaaggttccccagacggactgcgccgcgaacatggagctgtacaaagcctactacggctccctgacttccggtctggtgctctccgcccatgacgtttccgaaggcggcctggccgtcacggcggcggaaatggccttttccggcaagggaggcgttcggctggatctcacgaaagtaccgaccgtcaacggctggaaatcccccgcagtgcctctgttcagtgaaagcacgggccgcatccttgtggaggtggatccggaattcgccgcggattttgaaacggctatggacggcttcccctgcgcctgcatcggcggtgttacggaggaaaagcgtctcacggccacctgctgcggcggagaaaaggtgctggattgcgacatagccaacctcaaaaaactctggaaggacggacttaccccctattattgacctcctgaaaccggcatcttatcaaaccatcgatttatttctaccaatatgcctcacgcacttttactgaaataccccggcaccaactgcgatgtggaaacggaacgcgccctgcgcgcggcagggttctccacccagatccagcccatcgccacggctacgccggaacacgtcgcaaaatcccagcttgtcgtcctgggcggcggcttcagctacggagactacgtcaccagcggccgcctggcccagttggaaacggaacgcttcctgggagatgccctgcagcggcaccatgccggaggaggcatgctcctgggcatctgcaacgggttccagattctcaccaagctgggcattcttcccgactccagcctgattgacaacaaaaaggaacgctttgaatgcgtctgggccaaactggtgaaagtagccaggaactctcctttccttcaaggcctgccggatgaattcgaactgccctccgcccatgcggaagggcgcctggtcacccgtcccggagatgcggaaaaatacctggctgccgggaatgtggctctccagtacgtagacaaccgcgacggctgcgaatgcagtatcgccggcctccaggattccaccgggcgcgccatgggtctgatgccccatccggaacgctttctgctgccccgccaccactatgacaaggactgggccggcaacgaagactggggctgggggtacttcctcttcaaatccgcctttgacgccctgaaataaaggtccatttcccatcaaccgctccccccgcattcattccatgacagatacggccctcatcggttcttcttgcgccctcggcgttttctggtcctcaaaacggtacttcgactacctgattgatgaaaccaacctgtccctgctgcgcggcaaggaattcgggcaggccgtcattatctgcccctccctccgggaagggggcacggccattcgggggaatacggctccctttctggctcaggttaaaaccctgattgatctcctgcatgaggtgaaggcggaacgggtgacctacatcaccagcattgatacccagccggaaacgggaaatgaactttctcccttgctccgtgaaacggaggacgaatggctggcggctctggtagagctgaaagacttcatcaacctccggttcggccgcgtgctgaacgtttaccttccggaagtcaccggaacgggagcaggcatgagtgtggcggatctgctggcagcagttccggaagggacggaagagctggacgtagccctgctggaacgccaccagctttatcccatgcaccgcctggtcagggatgtggaaaaagcatgggagtgcggcatcttttccgtgaatctggtgccggaacccgtcactgcctttgaactggtggagcagtgcttcccttccctggtcaaccgcctccccgtcgcgaaggaaacggacccgtacgggagcgccagaacatccgtttactccacgcagtaccacgatccggacaccggttatatcatggacaagcaggacgtcctggcggggctctctccggacaaacagtcctagcccccggtcagcccccgtctgcgccctgtgcagtcggggctttttatcccccaccttcaaaaaagctcccccgcaggagccgtgctttcctgttgagcgcattccggaacggtgctatacaaaagccatgaagattagcgacgacagccttgaattcttaacggaacttctggaaacccccagcccttccggctttgaaatagatgcccagcgcatctgggcggacgaactgcgcaaatatacggaagacgtccagtgcgacacttacggcaatacctgggccgtcttccacgcggacgcggaagaagcccccacattgatgattgaagcccacgcggatgaaatcggcttcatgatccgccatatcaccaaggacggcttcctgtatgtggaacgcgtaggcggcacggatacggccatcgcacgggggcgccgcgtgcgcttcctgggttcccagggagaagtgatgggggtgaccggaaacacggccatccacttgcgggaacccggagaaaaggaacccaaaatctgggaaatttacgttgatgtaggcgcctcctccgacaaggaagtagcggaactcggtttgcgagtgggccatgtgggcgtttactgcgacggccccatgctgatgaatgaaaacaagctggtatgccgggctctggacaaccggctgagcggcttcatcctgtcggaaatagcccgcaagctgtgcaagctgaaaaagcccgtctcctggaacgtggtgctcgtcaatgccgtgcaggaagaagtgggttgcattggcgcgggaatgattacccaccgcctgcgcccggatgcggctatctgcatagacgtgactcatgccacggactcgcccggactggacaagggcaaatttggcgatatcaggcttggcggcggccctgcggtcatccacggcacggccaaccatcccaatctggtggcccgtctggaaatcgtggcggacaagaacaaaatacccctccagcatgaagccgccggacgccgcaccggaacggatacggacagtatctacatctcccgcgacggcgtagcctccgcgctggtgtccgtccccctgcgctatatgcactccccggtggaaacggcctctctgacagatgtggaaaatacaatcaagctgctgctggaattggtcaaatccctgatgccgggagactctttcgggcacaagctgtaatacggcacggacggcagcattgctgacaaaatgaggacatgaaccgtcctgccgggggaaggcgcgcaaaggcgtcaatctcccccggcacgcccccatgcggcagcattcaggccgcatctcccctttgaagcaggggtggaattactccctgcaggcatcctgcgtcctcatacggtcattctccgcttcccggcggtgcttcctggtcaccggcccctggcttccttttccggaatattttcccggaaaccattacaggccggaaaccggccggaactctttctcccggtcacatttcactgaaatccagccgggtcacattaaagtacgtttttcccttccggcaggaatcccacaggagaatcagcatgagggaaaagaggaccagtctccaagccacttcaaagggatagctggttaccaccctctccacaccgatgcagttgcaggagagggaaagccccctggcccagccctggacgaacaacgccacgaacgtgaacgtaagcgcactgcccagcagcgcggccccggcgcaggttctgcggaacagaagccccaggccaaccgcaatctcgcacgacactcccaggcaggccagaggatgcccccaggcctccgggaaaatggcgaaacggtcgatcgtctcctgaagctgatccagatgaagcagcttgcgcgccgcgacaaaaaggaaaaagccccccatccccagccggagcaggagcaaacagaaacggacgattttttcctttagcatcattggcgtattccgattattcgaagtgggtttgctgggcgctcactttttcattgcgcaacctgttcagttcatggcgcactttttccagctccatctgaagggatttctcccgttcggaggcaggagcctcggaggaagacggcgtaccggcaaccttcttcgcgctgcctgcggcgtcttccgtaaagagcattttcaatccgggagccttcgtgtcaaaccttatgacgccggaaacgggcttttgagaaccgggatgcttcacggaggctctcaccgtcaccgtgccgggtgttgaccccaggcgcaccagggccggagcggaaccccatttaacggactgggtcagcgtgccgtccggggaatccgtcagcagctcggcggggccttccacggaaaagacaatctcctcatcattcaggcgcttcactgttccgcggccatccgtaacctccgccaccacggcaaacacatcggaaccgttggcgcacaaatccactccatcttcccggtccagagtcaaccggattttctccgccctccgggccgggcggacttcatgcctggtcaccaccttgccgcctatcaggccttccgccaccagtttcaccgctccctccttgcctgctcgggcaagcttcttgttttccatgaaatcccaggctttagggaacacgacgggcacgcgcttgaggcctccgggacaggacgccaccttcttttccaccgggggccctccgttgacactcaggcgaacggaatcacaattggaaaacaccgtcacgtcttccggagaaaagggagtgcattcattggcgatgtgcaccacagggccggaacccaacccgttgcgcgtcttctggggacgctgggacataaatgcgtaataggaggttttgggctgcctgaaagcatccagaataccgccgtagaagggatccggatggtaaccgcgctgatggtcgaaaggatgccacaggcagccgccgaaatgataggccggagcggtgttcagcgtatcgtacgtcgtatatgggaacgaggtcttgaggtagtgaagggcctgcaccatcatgggagcttcaccccagtgacgggctacacgggaggtggagttgtgggcggatcaggtatccacgttatcaccgaattcacgggtaaaatacggtttgctgttcttccgttccttgatggaccagtgtttgtcccccgtaaccgggtgggcatacagaacttcataatgctggctgccctgagccaccgcgtcgcaagcggtgtagcatcccttgtacggatattcctcatgcaccaggtcgcgggcctttttggcgaaatccgccgggtaatgagtttcattcaaaataggttcccacatcatcacggagggatggttcctgtcccggcgcaccatctggcggatatcgtcatacacccggtccgcaaaagggccgctgccccagaactgccagcccggcgtggcgacgatgacgaaaaggcccagacggtcgcaggcgtccatgaaagccggatcctgcggataatgggcgctccggatcacgcgcatgcctgccttcctcaatttcacggcatcctgccattgcaggttgttgggcactgcattcccaagccgggcaaaatcctggtgcctgttgccgccaatcagcttttcaggaaacagggatccattgagcaccagccccttttccgtaatttccaccgtccggacacccacccttatggaacggttgtccagcaaatgggccggatctttggaatggtcccctccaacagcgtcccatacttccacgctcaacgtgtacaaatcgggattgtccggagaccacggtttcacgttggaaagcacaagaggaatatccacttcacccgtggaatgtggaggaatagtcagcggaaccgtctccccggcaggatccacccccttggggtccgtcatcaccgcctgcacgcgcaccttccgttccttgtctgtctggttggccacctgaaccttcacccccaccttgcccttgcgggtacggggatcaagaaattccgtccggaaaaaaactccccctccggccacagttccggcctcgttcggatccgtgatatacacgggtccggtggaaatgaggtacacatcccggtaaataccgccaaaataggaaaaatccaggccttcctggggtttgccggggggataggaagcgtcgttggaattgtccgccttcacggcgatgacattcttttgtcccggtttcagccacttgtccagattgacaatcacgggaagatatccgccgaaatgctccgcggccttctccccattcacccagacctcgctctttcccatgatgccctcaaaatacagggtgtttctcctcccctccagccgggagggaggaataaatgttttccggtaccataccggcccctggtagttggaacagccgctggcctcttccggaagaagctcaatgccgttggggaggttgacggactcccaggaggaatcgtcaacatccgggctggccacttcctccggcgccttctctcccttgaacagtttccagcccacattcatgccgtaaacgtcccttttcgttacattttccggcaggcgaagagcccctgccacggaataggctcccgtagatgaagcggcctcctcctgatcggaaaccgcatcggcataaagggaaaaagagccggccagacatgccgccgttatgagaatggtagtgactttcatcatggaataggggaatgcaaaattaatatacggagctcccccggcgccatctttcattcatataatacatccttgcgtataatgcaaatacatatgtcatccggcatcttccgcttgacctggaaggcatgttttttcatagtcgactcgccctgtacgggattatcccgcagccccggtccgagtgccaggttttcagtcccgtgaaaaggaaaaagcgaggcgttcctccaccggctgtctcagggctatgcctttatccactagttttttatgtcatctttctttcagaaaattgtcaaacttttctcctatgacattggcattgacctgggcaccgccaacaccctggtcaacgtcaaggaccagggcatcgttctgcgcgagccttcggtcgtcgccgtcaagggggacaaggttctggccgtgggagacgaagccaagcgcatgctgggccgcacccccggctccgtcacggccatccggccgttaaaggacggcgtcatcgccgatttctacatcacggaggaaatgctccgctacttcatcaaaaaagccacggccaggtactacctgatcaagccgcgcgtgctcatcgccatcccctccggcattacggaagtggaacgcagggccgtcaaggaatccgcggaagcagccggagcccgccgcgtgcatctgattgaagaacccatggccgccgccatcggtgtgggccttccggttcaggaagctgcgggcaacatgattgtggacatcggcggcggtacgacggaagtggcgcttatttccctttccggcatcgtttacagccgttccgtccgctgcgccggggatgaactggacgacgccatcatctcctacatgaggagaacctacaatctcatggtcggggaacgtactgccgaagacatcaaaatccgtatcggctccgcctatcccctgcctcaggaactctctatcgaggtcaagggccgcgacctggttgcgggcctgcccaagacagtgacgattcgatcggaagaagtgcgtgaagcgctcacggaacagctcaacacgattgttgacgccgtgcggacgactttggaacgctgcccccctgaactggccgccgaccttgtgcaccgggggattgttctggctggaggaggcgctctgctgcgcggtctggatcagctcctgcatgaacagacgggactgcccatccacattgcggaagaccctctgagcgctgttgcggaaggtaccgggaaagccctccaggaactggacttcttcactaatgttactgatgcggaagactaaagacggaatctccggagcaagcgctccggccttgcgtctgccgtactgccgcatcacatcaacgcaactgcctgcatgattcctttccggccatccctacagcttcaactccagccgctcctgacggaagacggcccaccggaaacattacgggcaatagcacaccctagcttattctcaccccgtgtttacaaaaatgcttaaaaaaatcaaacgggccttcggcttcggatcctgcgatcccatggaaggctccactatcatcatcaatgccgaaaagctcgaacgccgcgtagcccttctggaaaacggcgtattggaagaatacaccatcgagcgcgaaggcgaagacaatatcgtaggcggcattttcaaaggccgcgtcaagaacatcgaaccgggcctcaaagccatgttcgtggacatcgggcaggaaaaaaacgcctttctgcacttctgggacgcgcttcccgccgcactggactccagcctggaagaaatcgaacgcgaaggccgtccgaaaaaacagcagcgcaaaatcacgtccaaagacatcccggacatctatcccatcggctctgaaatcatggtgcaggtcaccaaaggaccgatcggcaccaagggtccccgtgtcacaacgaacgtatccctggcaggacgctacctgatcctgatgccttttacggaccagttcggcatctcccgtaaaattgaagaccccaaagagcgcctgcgcctgcgccagatcatgcagaaactgaatgttccggacggaatgggcatcatcatgcgcacggtggcccagggccagcgctaccgccactttgtccgcgacctcgccatgctgctggaacaatggtacagcgtggaagaaaagaaggaggccaatccagcccccgtctgcgtgtacaaggagccggacctgattgaacgcacggcacgggatttccttacggacaccgtagacaacatcatctgcgacaacgcggaaaccacggaacacatgcgcgccattgccggaaaaatctcgcgccgcgccaagcgccacatccagcacttccccgtgcgcacgcctatctttgaagaactgggaattgaaaaacaaatcaatgaagctttccagcgccaggtgctcctgccctgcggaggctacctggtgattgacgaaacggaggcgctgatcgccattgacgtcaacaccggacgcaacaagggcaccaaggatctggacaagaccattctggataccaatctggaagccgcctatgaaatcgcccgccagcttcgcctgcgcaacatcggcggtctggtggtggtggactttatcgacatgcgccacaggaaggaccagcaggccgtttataaggccatgaaggaccgcctgaaacgggacaaggcaaaaacccaggtactgcagatcacccccatcggcctgatggaaatgacgcgccagcggctcaacgagagcctcagggaatccgttcatgatccgtgcccgtactgcggaggcaggggccgcgtcaaatccgtgatgaccatgagcgtggaaattcagcggcaaatttacgcctgcatccagaaataccgggacaccatcggagacatggttatcgtcgtcaactcggaagtgctctcccgtttcaagaatgaagacgccagcctgctcatggaactggaacgccagcacagcggaaggctgattttccggggcgaccacaaccagcaccgcgaatccttcgccatttacgacgcccggtacgacaacaaacccctctaccagtccgggcaatagcctgaaaatcaaatccggctttccgggccgggcgataccctcgcccggccttttttacgccgccatgaacaacatccccacttcccccaacgaccccgtcaacacggacattctgctggtggcggaagaccgcatcaaagggttccgccgcctgcccttccacgccatttccgaacaatgcggacatcctgttccggtggttatccagcggctgaaagccatgatggaggccggagtagtgcgccgcgtgcgccagacgctgctggcgaccaagctggcccagggagccctggtggcctggtccctgccggaggaaaaactggatgccgcttttgactggatgaaggagctggacccttttacgggccatgtggtgctccgcaatacggatgcggccaaccccggcgccaactacaggctctggaccacggtcaaggtgcccgtggggtgcggtacgccggaggaacactgcggcatcctgaaacgccatatcggcgcagacggttatgttctgctgccggcacgcggcgtttttgcgctgggggtggggcacatgcgccgcaggggactcaggcccggagaaaaaactccggaaccggctcccatgcaggaaacgaaaaccgtctctctctcagaactggaatggaaggtgctcctctccgtcaaggaacagctcaggcctgaggaaatggtggaagatccctggtccctccgtgccgcccgggcaggattggaaacggaagaatactgccgtacggcggaagaactggaccggaagcaggtcatcggccgtttcgccacttttctggaacatgtgagagccaaaacggacgacggccccgttaccaaatacaacggactgttccattggacggttccctccggcatggaaatccgggctggagcggaatgcgggcgccacatctgcatgacccattgttattggagaacaggcggagatgtttttggaggagcgcaaatcatgggtgtggtacacggattggaaaaagatgccgttctggagcacaaggcggcgattgaccgccatctggaggcctccggcattcccatcctccacacggctgttttctggggtgaacgttcggaaatcaagccttccgagatttctccggaactgtataggaaatggatggaagaagtaaaaaaagcccccgttctgcagtaactcccttctccacgcccgcctccggcagtcttcccctggggtagaacagcttttccctccgaactcccgcgaatgccgtcgcgaaggcacaagcatttttaatgccgcaactgagatgccggctgtttcccctccctccgtcctgcagcaccgcttagttccctattcccggcctatagcggcttaataccgttttcccggacgttccaggatctttgatatattttcctgtcaattcaggaaacgggactgaagaaatccgtttcaagccttcagggagacgcacgcctcaacctgatgagctattcatgttctcctttgctccggcgctgtttcctttccgggatacaccgggagaggcttctgcctgcagaaacaagaaaaactcaacacaagggccgtctccccccttacggggagacggcccttattaaagaaatatcggccggcgaacaacctgccgcgaagctttattactgctttttctgcggctgtgcgggagcctggtcaggagccttggcaggagcaacagcggccggatgcttgtaggaaaccgcaaaaccgtcatacttggccggcagcttcctgtccgggaacatcagttcatgcaaacggtacagggcagccgcttccttgacaggagcgggacgggacttcagccgtgaatccggaatcacagcttcgggattattcttcctggattccacggcagatgagacgacgggattctcaaagaatttgacaacatccggcatgcgcaggtaggcatccagggagcgggccacgcaggcagacgccagttcttcatcggaaccatgcagcaaaaccagggcttccgcaaaataatccagcgccttgttccaatcctgggccaccatggcggccgcacccagggcatatttcatccgcgcctgctggaggcgggtggcattctttttggttgccaggaaagaaccggcacggcttttcacgccgttccagtccttatccggaatcaaggccatgatttttgccacctccaggtcattctgggcggaaggggacaaattggcccctctgacgggaaacttggccgccaaccctttgactccggcccaatccatcatgcgcatggcgcactccagttcatagacggccgcccgggcggacaggctgtccttgatggaaagcgttgaggcatacttattcaccagagcgtggaatttgttgcgggcttcctggtacttccggttttccatagccaccttggcatccacaaagtcgtccgtttcaaaaatatacagcgtcttgaaagcgctggccatctgctgaaggacttcctgggattccctgctctccacaaactggactgcgggtccattggaggaaagaatgtagatatccgtcggacggccattcttgatggtcggtgcggcaactctggcgcgcaggcgctggggattctgggcattctgggccatggacggaaccagggaggacagtccggccaataccattattactgaaagtgctttcatatgattgattactaaacctcttgttattatttctggcccttggcggcgcggacggctgcttcataggcggcaatgtccgcccgttcctggctgacggcaggatcggaaccgaacttggccgtcttatccttcacctcattgaccagggcactgtcctccgccgtcatcttcttgcggttggcgggagtatccagcaactgcacgtactggctgccggccttccaggcaacgtacctgtcggaaggctgcttgcccgcaccctgggacatcgtattcctcttccacagcgtatccatctgcgccagcacggcgggggcggaccacttcacgagccccttgtacgtacccgtgatgttcatgaagttaatcaacgccttgtccagctcattctgcttcaggtaggcttcaccctgcagatagaggacttccggcagattcttcttataggtcttgttttcgcggtacttgtcggcagcggcaatgacggccggccagtcctggcgggcggaagtgaacttgaccagattgtactgggcgtcttccatggccttgcggtccgggttggagctggattcttccttgctcagttcatccctcatcatcttgatggcggtgtccaccttggcgttatccttgctgcgccccagagctacggctttcccgaagaccgcattcttgcggtacttggacatgccgttgatgcgggccttcttacgcaccggatcaggttccgacgggtccaggatttcatcaaagtaggagatgctttcttcaggctgggaagtgccggccaggtgcatgccaagcttcacaagcgtgtacgggggcagatcggaaggcttgaagtcgcgcttcagctccacgaagagctgcttgaccagaccttccagggcggctttctcggcacgctgttcgtccgtctccacaggagccttttcataccgttcctgagtctgggcaataacggccatgcgaagcatggcgctcagcgtcttgtctttatcattgtccacgccggggaaccggtagaagtggttgcgcatggcattggcatccagattgcggcccagggcctgattgccggccatgtacgttttggtataggaattgacggcctcttccagaagaacggtcatcttgggatcgtccttcttgccttccctcacaataatttcctgcatcttgacggatgccgggtcaaacatctccttgtcatccttgaagaagtccatggcggcggcggccagctggaggctgtagcggctgccgggctggtcgctgtctttccagtactcgtcataccatttcttgacctcgtcccggcgcgccgtcctggccgtttccacggcttccttcggttctaccggaagaggcttcttggtagcgttaataaacaggttgtacacggcttccgcagcgggacgcttgtcgcccagcttcttggcggactccagagcggccaggaaatagccttccgcttcctgctcatgctccttgctgccggcacacagattagccagcagattgttggcatacgggaacaggcggtggtccttgaaattgtccacaatttccttcgcatctttcgcggcaagctcttcgtctccggggttcttgcggttcaggtagttgaaggcccggtcatacaatacggcggccatattggcctcccccttgtccgggaaacgggcaatgtaattggtaaaggaccggatggcttcatccgtattgcccaggttcgtgtaggtttcaccaagaaggtacatggccgttttcagataagtgctttcacggtattccttcacgaagcgttccagcaccggcaccgcttccttataacgggaagcgtcggcagcccccaggttgaacagggaggctcctttgcagtacagggccagttcatagaacttatgggtggggtcatccttatgcagctccatgaccttgtccgcctgctgaacgcagagatcgaatttcttttccttcagaagcccttccaaagacagcgtattaagcatgggggcatacttggaattggggaattccttcaggtgctgcgccacaagctcgcctcccttgtccgcttctcccagctgccaggtggtcatcgccagataatacaggttatcctccctgcccggagcatccgggtaggattcattgataagctggtaggcggcgcgggcaaccctttgggaaccatgcaccagggcctggttgcccatgaagctgaacgtgaaggcgtccatgacctttccttcctccttcatcttgttgaactggtcgatcagggctgtcaccttcgctctgtccagcgtatgggaaaaatccgtcacgccaggcactgccccgttggcacggcccagacgatccagggaataattggcatccgccattactccggactgatcgggaagaaggcccatcagcaccatcgccagggaagcataatcttcagactctttctgctttccatcctgaagcagggaacgggatttctccagcacttccgcaacgtagctcaccagccgcggggcgtacaaagccacacgcgtggggctgatattcatcacggaagggtagttttccacaaacttcaccgtctcactgcatttgccggtcttaatggcggcatccaccatcgccaggaagccattggtaataacggcatccgtaatgcggcgccccttgtagcgtgacgtgacgcaagaggtaaggttttccatccctttttcaaaagcaggcggggacatcttgaaatagcactgggccagaagaccctgcacttcaccggcattgacgtttctggcgacaggatcgctgcggtattctttcaggaatttttccagcagctccgcgcccttggcaaaatccccaagacggcagtaattttccccttcccggaacagggccattttcacgagctggtttttagcgctcgggaacttggtgtaacaagccttgaacgcttccacagcttccttgtaattcttcagctgggccagacagacgcccttctggtaatagaaccagccgaagccgtcatccagccccagcatcttgatacggggttcataaacgcggatgcagcgatccacggcatccagggcttcctgccacttcccttccttaatggccgtcagggccgtgcgctggtaatcgcgcgggccatgctgggcgccggatggaagaaccgccccgatactcagcacggaaaccaggcctgcagccagtgcagtagtatagtttgatttgatcatgtgtttaaaattcgttgaaacagaagagataataaaacaggtgcaatatctgtgcaaatacacggaatacacctatctgtaatggattgcgtcattttaacaggatgagtcaaactctaaagaagaaagttttatctttttagtcatccttgcaagaaagttcttccaccccgcgtctatccggagttggagcaggtctgtgccgcccggccggaaaaatactgctttttccggtataaaaaggctttttcaatatccctctacacactctgcggccaaaggaatgcacgctttccgctttcaaaagtttttcggtggaacacagcccactgctccatcatgcccttaaggagcctcgaatcccgtctgtcaggatgccagaggcacatttgacatggcgcaaacagatcgtccacccaaccggaatcccatttttccggcatccgcagccatgccggccttctccccggcaacagccatcccctcccctctcagttctcctttttcaacatgaaatcccatccgcgagttgaaagggaatatcatgaaaaacggtgcggaattaacgcctccgtctttccaaatgaaaaaacagctatccccccacgggagggacgggaaaaaatacacttcctcccccgtacttcctgataacaatatcacttcccggaaaccatcaacaaggacttcctgttactgcacaataagataaaggtttcgagccgcttttctccctgctctgctgcatcctcctttcaatatactctttccatccctcccgtgaatgaacaggttttctgaagccggcccttccaatactctcctgactgcctctcctcctcccagccacacacggaatgcaatactggaaaaagacggcaacacttctcctgaagtttcgttcccggacagaattcacggctatccgcctgtcacctgcgatcccacaaaagggaaaaacggattcagcaccgggccaagaaaggagtattgttccggccaaaactgcatatccccaccagaacatttaccgtacaacaaaaagggcatgatccggctccggatttctctacggggcttcccccccttgccgtaaaatgctgccgtatgcgggcctccgtttctcccgtcaataacaaaaaaagcttccgctccttttgggagcggaagctgagggtcaatgaaaaaaataaaggtaatttacttttagtcgtccttaaggtcggtcagagccaccgttgtaatcccggcctccgtcaacgcgttcatgacgtcaataacgcgctggtgggggacatccccttctacccacaactgcactaccggcttggtgcctacagcgctggcctcctgttttttggcttccagctgctggacgagcgtcgccaggttgtggttgttcatgtcattgtcgatcatcaggctgttgtccttgccccagtagattgtgccgtccttgataatacgaatcagcgccggttcaatctgggaggcgttttcacccacggactgccccggcatggacatatccaatttgcgttcctgaaccaaggaggtcgctacaatgaagtaaatcagcagaaggaaacatacgtcgatgagagaggaaatatccagcttgggatcttcatcctcgactgcctctagttttttatgtcttgccatagcgcgtaatgttattcagccttggttgcaggagaggaattcttggcaggcagtacggcaaagatcactttgactacgccgcattccgcagccacacggattacttcccgggagcctttgaacagagcctgctggtcaccccgcagatagaggcgcgtttcaaaatcctgcttgtctttgaaacgttccacaaggtttttgatgtattccttgagttcatcagaagaattgagcggggtacctacgtcagaggaccagagaacgctgggatctacgccgggcggccgcttacccgcgccttccccataaacattcaccacaatgcagccgttggcggatttcacttcaccggagctgctggccgtgggcatctgaatgttcttatcctttttaacggtaatggccgtagcgttcaccacgaagaaaatcaacaggaggaaaaccatgtcgatcatgggggacatatccatttccccattttcttcttcaggcgctacattagcttttttcttacccataagctacattttgttgaggttttccggcccggttccgactgagcggacgcttccgggccagaccgcctgttccggcaatcaggccagaccttcggggatgcgggcaagctgggcttcggcattcaccacgttgatggaggtgttcaccatttcctgcacagtgcccacgcattcggcaatctgggcgttggcaatgcccttctggaagaagaagaacggagtggcgataatggcgttgatcaatccccagaacgttgtcagaagagccacggaaatgtcaccggccagctgggtggggtccgcctggccggcggtagccagcgtaccgaacgcgcccaccatcccctgcaccgtcccgaacaggccgagcatgggagaaatctgcgcgcaaagggccaacatgttgatccatttgaacacggaacggctttcattggccgtaaagtcggccacggcgtcttcaatagcatctttgccgaggtcttccggacgggtagcgtccacgttcggcagggcgtaggcaaccagacggcccaaataggtggggctgccggccgcaacttcaatggcggaccggatgcggcattcggccatcagctgcaacagagtgaccttgagatcttccgggcagaatttttcctttttcagggctaccatgttgtaaatcaccaggaaaatgatgaaagcttccaccagcataatcggaatcatggtccaaccaccggcgatgatccatttgtcaagcatggtctgttcctgcggggcaacggcttcggcggcttcctgagcgaaagcagatgtagaaaacgcagccatcaggacggaagcaaatgcaacgaaacggaaacccagtctaaaaaggttcttcataatttaagttctatggttgttcgaaaagatactggtgtattaaagcatgcaaattcagacttgcaagcatcattttagaccctgtaaaaaattcagacgcctgcgcagccgctctcccgggccagccggctgcagatggggcagcgccccccgcatccccgcgcagggcaatattcacggccgtacaagacaatacgcagatgaagatctccccacaatttttcagggaaaaggcttttcaaatcgcgttccacggcttccaccgtttttcccgtgctcagcccccacagccgtgaaaggcggaaaatgtgggtatccaccggaaaggcgggaacgccaaaggcctgaaccatgacgacggaagccgttttatgccccacccccggaagagactccagagcagcaaagtcgcaaggaacctttccctcatatttttccaccaggatgcggctgaggttcacgatggcggatgccttcctttccgagaggccgcagggcctcacaatttcccggaccgcttccacatcctgccgggccatttcctccggggtggaggccagggcaaacagagccggagtcaccagattcacccgcttgtccgtacactgggcagacaagagaaccgccaccagcagcgtgtaagcgtcacggtgcaccaggggaatgggaggagccccgtacagggacatgagttcctcctggacaatggaagcccgtttttccgtattcatgccgccagattaccactccgcccgcacggcggaaaataaaaaagcgccgccatgcagcgatggcggcgccgggatggaaaacatgggtcagtcggccttggcataaaaccccttggaaacgcggtgctgcagggccgcatacatggcgcggcagtgcctgtagccgcgacggctgccgagcacctccagactgttggcgggatctccccagcggacgatagtcagttccacataacggcggccccattccttcatcagctttttgttgggctggtaaatatcaatggttccggtgccgaccagggcgcttccgtaatcatcaacaacgtaaaggtagggctggcccttgatgcggaaagtagtccccaaaggataaacggaccagtctgcagcggcgctgcggacggaagacgtgtatttcagcgccgtaccgacggcattccggggaccgtaggccaaatggtcgcgctcggaatgggtataagccgtggtgcgcactacgcgggtgcgctgggcgggatgataaaacggcatcttgtgcttgtcgcgccccaacttgggaagtttggaagaaggcgctgccgaacgactgggcgccaggggctggacaaatccctgggcagtttcacctacacgggccaaaacaagagcgtcactactggatttccccatgccggttacagcgccgtttgtcgaacagctgctgacaaacatggccgcgacggcacaagacagggtggcaattattcttaaattcatgcggtacgaggttaggcgccatacacatggcagtcactccggcaaaaccttcaggccatgtgcggaagccggaaaatcggcaacggcggctcttgggtacgaaataatccctgccttggcaatcctttttttccgcccacaccctcccaaacaaggaaaacctattaagataaattactaaaaataaacaatatataaaacatgccgcatttttgtcatatcatgacaaataatatacttcccgaaatacttttttctatcacaacacgacacacttttttatttttatcatatttcatttataataaaaaatttacacgcatgaaaaatacacaatccctcaaaaatattccctgaaaaaagtgtcaggggctgtactccgcaaaggcgtcatgagcaagaaaaacgcgtctcccgttgaatgaatttccttttgccgttcaaggttccacgcgaatccctactcgaccccctgccatatccgcactttcacagcccttccatgcggcagaatgaagggctcaggaagaggttggtaagaacatacccttgtaaggggaaaccagaaaagtccggattctgccaggtaatgttcccgccgcagaaacgcactatgggaaaagatgcgcaagcccggttgaaaaaagggctcctctcccttgccgctgtcttccaaattctggataatgctcataccagaaaagcgtatccaaccgggaaaaaactttcccctccgtttaacggcatctaacgcgggaagggagctcttatgaaattttcttctttccccttcccttccgggcgaccttccataagagtccccggtgtttcacccggcagacgggcacataccgaatgggctgttgcatccatccggaaatagattacactccggaacgaacatgtccgccggccttccccaacacctcacgctggattatctacgctccctgctatcccggggcgtggagaaaaccaccgtcacggaggaagccagaatggccctgagaaaatgggtcatggacgcgcgccggatatccggaagccccctccccgcttccgtttacgccaagcctgccgcaaatgaaacacggccgcaacagcccaccccggagcagatgcctccagattccgtggatgaagcatccttcggcaatgaactccgggatatcctcaacggagtacagccgcacagaacggaagaggaagctccggtgccccgccatatttcctttgatctggaaggtgaaacggaggaagaaaaactgtcctccctgcgggagctggtcgttaactggccgccgctccggaacatggattccttgagggaaacgcccgtgttttcctccggcaatcccagggcggacatcatgatggtaacggacgcccccggcctatatgaagaaaaacagggggttcccctggccgggccttccggacaaaagctggacgccatgctgaaagccatggggctttcccgttccgatatttatctgacccatctggtcaaataccgcccggccctcccccggcagcttaccaataaccgcccgcctacagaccgggagatagaaatttccctgcccattctccgggaggaaattatgctggtgcgcccgaaagtagtggtggccctgggagcaatctccgcccgcggcatcctccagtcaggagagacgcctctttccgccctgagaggcaccttccacacagctttcaacacgcccgtgcgcgttacttataatcccagttatcttctccgaacggaagatatttcagaaaagcgaaaggtttgggaggatatgctgtgtgtcatggaacaggcaggcctgcccatctccgaaaaacaacgttcctatttcctgcccaaaaagtaatatatggattatttaaacagtattctggagcgcaaacgcgccgatttgaaaaaacttcttcccctggaaggaaaattacgggcctccgccatccagcggaacgactacgcgggattccgcaccgcggtgcaccttggggaaacccgcctctccgtaattccggagatatccagggtacatcccgccctccgcctccgggaagcagcccaggatatccggcacatgtacggcatgttcctccagggcggagcgcagggcatttccatcgctgtggaaccggaagtatacggcgggtcatgggacatggtttccactgtttccagaatcagttccattcccgtcatggcgcgcgacgtgttcattcatcccgccatgatctgccaggccatcgtctcgggggcggatgccgtcaatctggtggcggccgccctgccggcaaaggatttgtcggagctgtaccgcatggcttccgggctgggattggacgtgatgatggaggtccataccctgaaggagcttgaaaccgtcatggatctggaagcggaattcatctgcatcaacaatgcagacccgcatactctccagtccaatcctgcagtcacggagaaactcattgaagaaatacccgcctccgtcactgtcctgtccgcagggggcatccgcaccgtggaagacgcgcgccgcatgctggacgcaggagccaatggcgtccttctccaagacgaacttgcccgcatggatattccccaggatttcatggaggccattctggctcttcgggcggactgagtttccactccctctatattataatagaaaaacatctgcatccgcatggggaaatgcggggctaaagagattgtcccgtccgctgcggcagggcttcgcgacctgagctccgtatccgccgcgtttccttcccgcctttccctgccgtcttttcatgaagcgggcaaatccttcgccccgaatgctccgcggatatgcctgaattccggaggcatcccttccctgtacaggacttccacaacatcgtaacgggaattcaccggttccggaagcaggcgaagccattccgccgctccccggcgtatcagcgcccttttacgggcattcacagcgcggcgggcacctccataaccattccccgtacgggttttcacctccacaaaaaccaggcactccccttcccggcacacaacgtccagctctccgcctctgacgggacgccagtttctcctcaggataacgcacccttccgcacgcaggaaggaggccgcagccagttccccgtacattcccagccatgccgtatcccgcttacccctgctcagggatggacagttccatttgtgaaaccggcgcaaacgagcggcgatggagcggacagggcccatgccgccgcagagcttccatgtgggcttttgtgccatatcctttgtgttttgcaaaaccatactgcgggtaggaagcgtccgcttccatcatcatgcgatccctcgtcaccttggccagaacgctggcggcggctatggaaaggctcctaccgtccccctttacaatggcgcggtgcggcacaggaagccccttgacaggcaatccatccaccaggcagaaatctgcacgcagggccagaccttccaccgcacgcgccatcgccagatgagtggccctcaaaatgttgaaccggtctatttcttccacggaagccactcctacggaacacaccgcctgttcacactccaaaagagccagaaacaggcgttccctttttgctgcggtcaactgcttggaatcgttcaaaccggttaactcctccgccagaacaggcaaaataacggcgccggctaccacgggaccggccaacggcccgcgcccggcctcatccactccagccacgcaaagaaaaccggaggcccgggcctccatctcaaaactcatatccggatgcggtttttccttcatggcgctattcctcctcctgttcctccggaaggcgggccagcagaatctgcgtgattctcctgccgtcagaccccgtcaccacagcccggtagcggccaatccgcaattcctccccttcttccggaatataacccatccggctgattacgtaaccgcccagcgtagtaacgcccggacaatccaaatccatttcaggcaggtaatctgccaggtcaaacagggtaatagccccattgacggcatatgtatccttgccggttttcacaaactcccgcatttcctcctggtcaaactcgtcctgaatgtcatcccccacaatctgttccagcacatcatccaagaataccaggccgatagaatcaccgaattcatccactaccagggcaaagtgggcatgttctttcagaaagaacgtgagaaggctgtccaggggcatcgtatccggcaccacgcgcaattcacgccgcacgctcctcagatccggattttcccgtcctaccagtttgagcagatctttgacatgcacccagcctttcacttcatccaggtggtctccctccaccagcggaaaccgggtgtggcgggatttccgggcaagctcccagttttcctcaaagggagccgtcaaatccatcacatccacttcagagcgcggggtcattacgtccttgacgcacatatcgttcagttcaagggcatttttggaaatttcagcctcctgcttcgtcagctcgcgggaacgttcgctttcttccaccagatacatcaattcatccgtgctgtgcaccgtgcacgccgtggaacgggggtctatgcccagcaggtatttcagcacaaaccgcgccattccgcccgtcaggccaagaatacccgtatatctgaacaccgtataaaagaaatacagcaggggaaccgtcgccagggcggccttgtccggctggcgcatcgccatagccttggggataaactctccaaataccacctggcagcaggcaaagaaaataaatgtaacggccagagcgattccgtaaacggaaaccatgcctcccaatcccagggataccagaaagggagctgtcagttccgatacaaaaaacgttcccaggaatcccaacgccagggaagaaagcgtaatgcccgcctggcaggcggccaaataaagatcgggatgcttggcagccttccgcgcccgggccagttttttccgggttcgggccggaacaccttccccggcgtgcagctggctttcacgaaccttcatcaaggcgaactcgcctgccgcaaaaaacgcattcaacaacaaaaaaaggataaagccggcaactgccagcatcatcccacccagcgccgggcctgcaccgggcgcttcagcggccccgaaggccgcaagaatactcagaggatccggatcattcattctgattcaaataatatattcggagaagaaggcagagatattgcccggcactttgtcatcacagtttttcataaacgcccttgtcccggcgctccagcacggtgaatccggcagccttggcgtctgaaacggaaagaggcttggtcacctccggcacattaatgcggctgatgaccttacgcacgggatgcttgcacaccaggcatttttcaagcggagcacgatccacgggacgcctcaactcaaaaccgcggcggcacaccggacaggactgtccggggtcgtcagggttttcagaaatatactcgtatatgggcatagcaaaacgctaggctaaataaaaatcagcctagcgtcaaaatctttataaggctgcaaccttttcctgtccttaccagctggacttggtcacaccgggaatcatgccggcattggccagttcacggaaggaaatacgggaaagcttgaaacggcggataaatgcacggcggcggccggaaacaaggcagcggttgaccgtacgggtcgggcttgcattgcggggcagcatggttaaaccgatataatccttctcagccttcaattgcgcacgcagttctgcatagcgcttgacggtttcagcctttttcttgtctcttgcgatccagctcttcttagccataagttcggcggaataagtagagggacggggatgaaaaatcaagcgctttttttcgattttatcaaattcaagccgttttcaatgtcatccgacctttccggcggtctttgcgcatggaattgaatacctgtttctttcacaaacatatcgcgtgaggaggcatccggaacattcgcaacaggatggaagaagctaatttatttaactcttcctaaccattatctccaacaccccaggaaacatatttgaaagaagttcatgcaaaataccccgctcccagggctcggaggacattttctgaaaatttttctagaaatattccggcatgaaaacggcgatcgggcagggaagctccgtcgtaaaaaacggcccttatctccgtccctgcagtaaatattgaagaaaaaagacatggggagttctgcctacacgcaccgcctgtttcagatccattgcgcaatcaaattcatcatcagggaggacaggaccgggaactgcaccatttacgcagactggcggcggaaccgttcaccggacaggcttcagctgggaatttccgtgagagtatgcaaaaagaacgcaagatatggctatctttatataggaaagcggctgtttcactcctgttccggatgatggccaaagattgccgaattcatgaacggaaaccggaaagggccgacattttcagcattttgtacggagtgccgttttccaatgggttccagtaaaaatcccgagtaaatcccggaaaaagctgtggaagaaatgagcgttgctttccccggtaaggccggttcatctccgcttggaaccgtttcatcaaagcagtctccggcggctccgggaaaaagcccgcggcgaaacatgattttgtcctttcctccggggggggaatggggcatcatgccgccgcacactaatcattgacgtacatgaaaatcgtagttgcatactctggcggccttgacacctccgttcttctgaagtggctcaaggaaaaatataatgccgaaatcatcgcctactgcgcagacgtaggccaggcggaagaactggacggactggaagccaaagccctggcgacgggcgcctccaagtgcttcatcggcgacctcaaggaagacttcgccaccaactacatcttcccgatgatgcaggccaatgccctttacgaaggccgctacctgctgggaacctccatcgcccgcccctgcatttccaaagacatggtggatctggccatccgggaaggcgcggacgccatcgcccacggcgccaccggcaaggggaacgaccaggtccgctttgaactggccgtcaatgccctggccccgaacatcaaggtcatcgccccgtggcgcgatcccgaattccgccagcaattcccgggtcgcacggaaatgatcgcctacgcggaatcccacggcatcccgatccggcagtctctgaaaaagccttattccatgaaccgcaacctgcttcacatttcctttgaagccgggatgctggaagatacctggtacgacggcaccacccccgccgaccgtgaaatgtacaagctttccgtttccccggaagatgctccggaccaggccgaatacatccagctcctgtatgaaaagggcaatgtcatcggcatccagtacgatggtctcgacgttctgctgaaagaactgggcgtcaccccgaaaggagaacgcgacgggtataccctgctcagccccctgggcgtcatgtacgtgctgaacgccctgggcggcaagcatggcatcggccgcgtggatatcgtagaaaaccgctttgtgggcatgaagagccgcggcatttatgaaactcccggcggcaccatcctgctggcggcccaccgcgatattgaaacaattacaattgaccgggaagtgcaaaaggtgcgcgactccctcatcccggaatacgctacgctggtttacaacggcttctggtttgcaccggaacgcgaagccatccaggccctggtaaccaaatcccaggaaaccgtcaacggggaagtacgcctgaagctttacaagggcaacgtcatgtacgccggacgccgttccccgcagtccctgtattccgaagaaatcgccacgatggaaggcggccacgaggaactgtacaaccagaacgacgcggaagggttcattcacctcaacggattgcgcctgaagcaattcagccgtgtcaacaaaccctacggcaattaagcgcccgtaacggtaccactctttatcaaaccgtccggaaaaggtattccggacggttttttctttgcaataaccttttcttttcctgcgtagtgaccgttatgggatttctttcacacgcatttctggcggctgcattttcgctctctccgtttttggcatccgccgcggccttcaaacccaatatcatttttatttacgcggatgacctgggcatgggcatgctgggctgctatggccaggaaatcgtgaaaacacccaatatcgaccgcctggccagccagggcatcatgttcacccggtgctacagcagccaatattgctgcccggcgcgcgcttccctgcttatgggcgtgcacgacagccactcccattcctacacccagacggcgggagccctggtcatcacggcggaacggaaaggctgatccaatgagcaactggaagagaaagcggcacgggcagcacgcatcaaggccgccgagggagaagtgttcctcccggaattgctgaaaaaggccggatacgtcacgggacagttcggcaagctggaatggggattcaccacctggcacggagaattgaaaagacacggctgggaccgctatgtagggtacatggaccatcaaagggcccatggcttttatccctccttcctctggaaagacggcgaacgcctccccctgaaaggcaacacccacgccgacggaggcaaaaccccggaagactacagtccgggagccacagaaaaacgaagaggcaacagggaaggtaaagtcacctacgctccggacgtgatgctggcggaaacccttcgtttcatggaggaaaaccggaacaagcccatgttcatctttttttccaccaaccttccccacggcccggtagatattcctccggaagaaaacacgtacgcgggctcccccgccatcctccaggcctatggcaatgccagcggaaccaacagggaatgcgccggagcggcagaagaatacgcttccatggtggacaagctggacaggcaggtcggagccatcgtggaccaggtgcgcaagctgggcctggacaagcgcaccattatcattttcagttccgacaacgggcatgaactttactaccgtacggataaaggccgcggccgcgggcccgactgccacggaggcgtcctggacggcaccggggaactgctggatgttttccgcggcagccgcggccgcgttgggccaaacaacgccatggccaatctggccggactgaaatggaccagccatgaaggaggcatccgcgttcccctcatcatttcctggcccggcacactgccctatgggaaggtctgccacagcctggtggccaattacgaccatatggcctctttcgccgatcttgcggggatccgcatgccggaaggtaaagatgccgtttcctatatagatatactgtccggcaactccgctaggcagcgcgattatgtggtcgtggatcacaccgtcatcacgggggacggctggaagcttacgcaaaaacaacataaaccgttcctctttcaaataggcaaggaccctgaagaaagacataatcttgcggaaacaaggaaagaccagctggaaaaactccgggccatttacaggaaggaagtgggcagccccagaaaagacaggtgaaatccggagctgacccggcgtccccctttttccgccgggcgtttttgcaggttgaaacctgaacgttccgcatgtagagttccccggtgaagaacaatcccccctccccccgccagacagcactgaattgcctgaggagctggcatgcaggccgctccttcgcggaaaccctcgtggaccgggaatgttcacgaaccgcgcttccaccggcagacaggcacctggtgcaggctttggtcttcagcgtattgcgcaaccagacctggctggaccacgtcatcggaaccctccggaaaggcaggctggacgtggaagcgcgtcttattctccaactggggttgagccagctttttctgctgggcatggcggactacgccgctgtgtatgaaaccgtgaatctcgcgtccgtacgcctgagaggactggtaaacgccatcctgcgcaacgctttgcggcaggagaaaaccattctggaggaacgggaaaaacttccgctttccattcattattccacccccgcgtggctggtacggagatggacggaacaaatggggccgcaaatgacccgcgacctgctccgctggaacaataccacgccgcgcctgtatgtgcgcgccaatcctctgatgcccatgaaaaatattccggcctccctcgccccgctggaccgcgcgcccggctggttctccgtggaaggccttctgccgctggaggaaattaaaacaggctccctttacgtagcggatccttccacccgttattccattgatttgctggccccacagcccggagaggaaattctggacgcctgcgccgcccccggcggcaaatccgccgccatcatcgccgctaccggaggcaaagcccacctgaccgccacggatctccacgaacaccggctgcccaccctgaaggaaaacctggacaggcagggttcttccttcgtcaggacggcgcaggcggactggtcccttccctgccgcacggaatggaagggccgctttgacgccgtgcttctggacgttccctgttccaacaccggagtcatccaacgccgcgtggacgtgcgctggcgcctgactccggaggaaatccgccgcctggccgcactccagaagaccatcctggaaaatgcctcccgcgccgtcaaaccgggcggcagactggtttattccacctgttccattgacgcggaggaagacggactgctggtcagggactttctgcagaaccatccggaatggacgctgaaagaagaaaaacttatccttccccacgaggaaaaatcggacggcgcgtatgcggcccttttgatctgtgcttgacctcagcttcaatttgtcaacaatgcgtgttcctgattaatatcattccattatgtcccgcaaacccatcattgccgccaactggaagatgaacatcggccccgccgaaggcgcccagttcatcgaaagcttcaaaaacctcattaaggggaaagacgtcgcgtgtgacgtggtcatcatccctcccttcaccaccattccctccgtgcagaacgctctgggcggttgctcctgcatcgccgccggagcccagaacgtctcccagtacgacaacggagcctataccggtgaaatctccaccagcatgctgaatgaactgaacctcaagtatgtggtgctcggccacagcgaacgccgccaatatttcggagaaacggatgccatcatcaactccaaaatcaagaaggccatcgccgcaggcatcacccccattttctgcatcggagaaacgaaggacgaacgcctggggggcattttggaacccgtgctggaaatccagctcaagggcggtctcaaggatctcaccccggaggaggtatccaacctggtcatcgcctatgaacccgtctgggccattggcaccggcctgaccgcaacttccaaggaagcccaggaagcccattcctttatccgcaaggttatttccgacgtcttcggagcagacgccgccgccaaggtgcgcatccagtacggcggctccgtaaaaccggaaaacgtggaggaactcatggcccagccggacattgacggggctctggttggcggcgcttccctgaagccggaatccttcgctgctctggtaacttccgccaaataagcgaaatccggcgccgccctttctacaggccggtccttcacgggaccggcctttttcatctccggagcaccggcctcgctcttttcacccaagagcgcagtttctgccttttcaagcagcctgaatcgtgcataatggcgggaaatcatgaaaacccgcttacttaccccacgcagcaaaggtttcacgctcattgaagttctcgtagtcatcgccatcattgccctgctgtcaggcgtctcctacagcatttattctcatgccacggaaacggcagccagaacgcgctgcacggacaacctgcgccgcattagcgactggggcaaggaattcgcaggccagaacggcggaaaactgccctccagcggcatgaaagacagcctcctgagcgccagggaatgccggaactggtgggacgccctggcgcccatcgttaatgcggaacaacccgacctgatcgcccggaacgccaaggaacccaacatgctcccggacacgttccgctgcaaaaacgacaagcgtccggaaatcctcggagcggaggatgccaaccttcccgccgggccggacaccatttcctacaccagctggctggacaaccggaaggggcgacccatgaatgtggcgcgcggccaggccctgcggggcaaaccctggatcagcgacggcatcccgattgacgggcgcagcgtcatcacggaacaggattttgaggaaatcgtagtcccggcccttgaacgccaccagggaggaatcatggtgctttatgcggacgggaaaatatcccccgttgaggaccctacgcttaacaaagtcacccaaggttcctgaaccccttgtttctccgcccggcgcgggcgggaagctgccggaccattgccggcaatccagtggaattttcttcctactcccactgattcgcctttacgaaaccgggataatcattaaggttagcgtccagatgaaccagcatgctcccttcctgcatccgtacgatggaatgataccactgtctgtggcggggtatatcctgggaaccgttctgttgctggttcacctgtatgcgctggtaaaaaggcagcaggtgcaggcttttctgctggcgtctccgcgcaaccacctgctggctcagattctgctggccggcggcctgttctggttctttctgctggtggctcccgaaggattgggcgtgctgagccgctttcgggtggggctggcggaatttgaaggtatccgctggctgctccagctggcatgccccgtctttctggtgctgatggtcacgcaggtgaaaaacctgctctttccacgggcgctgggcatcttcggcctgatggcggcagctcccctgctcagtgccgccttccttcaggagccagtgaccaggctccttattcccatctggtgttacatcgtcattttcctttcgattctctggataggcaagccctacctgtaccgcgacatggtcaataaaatatgctccaaacctgcttggtggacgcctctttgcctgggaggaatggcctatggagccgccattctgctttgcgccatcctatggtggtagggaggccgcctcttccggcactgcttcatcacgcagaaaagacattcagccgcaggagaaggcctccggcaaaaacaggcatacgcaggacggatctttccggaacggcctgttttttcctcctgctgcaagaatcaatagcggttccgcttattatatatgatattccatattcctttcatgtgctctaccctgcgttcctccatcatgtccagcatagccttctggttgcttacccttgtcccttcactggcggacaggcctaatatcgtccttatcctggctgatgacatgggatgatctgacccgggctgctacggttcggaaatacccactccagccctggataccctggccagacaggggatgctggcaacccgactctacaccgcttcccgctgttcaccctcccgggcctccatcatgaccggctgcgaacctcacaaggtggacgtagggctcctggatgacgacagcggacgccccggctaccgcggacgcctgaacccggatatccccaccctgccggaacttctgaaaaaagcgggataccgtacctatctttccgggaaatggcatcttggaaaagttcggggatcctatccatgggaccgcggcttcgaccgttcccgcggtttgctgggtggagcggcagattactacaggcccatgccggacagacccttcggtgaaaacgggaaactgctccgtccggaggatctgccggaggatttctacatgacggacgatatcaccaaaacggctctggcctatattgacgatgccgtcaaaagcaggcagcccttcttcctttacgtggcttatacggctccgcatacacccctccaggccccccggagggaaatagaaaaaatgctcccgttctacaacggcaaatccccccatgccattgcttccaaaagactggaaaaacaaaagctgctgggaatcgtccctcctgccgccaaactgggcatggccggcaaattcaatccagaaggctatgaaaaaacttccgcaaagcggaaggattatattgccgaatgcatggccacctacgccgcccaaatcgttatcatgaaccgcggcataggccgcattctcgcgtccctggaacgtcaccgcctcagtgacaataccatcgtcatgtttttatcagacaatggcgcaacagcggaaatgccccagaacaataaaaacaagaagactaccctccccacaggcccgctgggagaagtcggatgcagggacggatacggccccatgtgggcggctgtgtccaataccccttaccgccagtataaaatagaaacctttgacggagggctgtccgcccccttcatcattcgctacccttccaaaatacgtccgggatcgcgctaccactcgcctttcctgcttcaggacatcgccccaacctgccttgcgtgggccgctctcccaattccggcccatatggacggcaagccgctcaacacctactggaataatcctccggaacttcctccgtccaaggtgtgggacttcattcccaatacctgccctccccgcactatcttctgggaacatcagaggaaccgggcggccctgacaagtcaattcaagctggtggcccccaaccgcggcccctggcaggtgtacgacatcagggacaggacggaacagaaaaatctggcatccaggcaccagacgcttgtagaacaattgtccgcacagtacaggaaatgggcggcggaaaaccatgccgaacgacacagcccggcagaaaaacgggcatacgcgccctaaacgtttctatgggaatccccttccggaagaaaattctgatttccgtttcctcaagtaacggaaaacggcatgtgattcaccgggaaagaaaaagcagggaataacagttattcccgtccgcggcaacattcctgtctcccgggcattccgggaaccattcattattttcacactccttgccatcctttcccatgaaggggaattacataaaaatccgcttcttcattcggatttttcctatgccctattttttgccctgtaatcaaaaataattcctttataaggttaaaaccaggcaaaacaccgctgtttaccaaatcatttcccaaaaggaaaactcttcttttttcctaacaattattggaataaaagaatccttatcattcaaagaaataccgtattagaatacttctaaattagcaaaaaactcattgattgtaaataaacttaatttaaaatgccataagaaaaaacctttctgtaccttaccttcgttctgcacagccgtcacatcagatatggaatatttttgataatcaattcataacacacctttaacaaaacttgcacagcgtctttttatgttcaaagagccctctttcctcaaaaaagcaaatctgttccagcctattctggttgtcgtgatctccatcatcgggggaactcccatggaaggagccaatacggggaaaatagtccttttgatcatcctgggcgccgctttcattgtatggcatgtggaatgccagagactgctcaacagaaaccgggaaaccagggaacatgcctgcgccctgaaaaaccgcagtgcggctctttacaaaaaaacttacgccgccctgagcggagaatacgaaaacttcgccaataaactgaatggagaaagttgccgggaggcaaaaacggacggttcaagggggacgacggaaagcttcaacggagcctgcctgttcctgtgctccaccattgccgctgcgctggctgaatataaaaactcccttgtctttgaagtgctttatattcaggcagagcggaggaaagaccaaaccttgctgcacgttataggctacgcacagggagaacacaataacgacaccccttccctgctggcacagcctccgcggcccgtaacgaaaacacccgccatgctggatgaacaattattcgcggaacgccacctcagccccctggttctttccagcccggaagaagtgcagcgcagctttttccggaagcgcaaccagcctccggaggaaaaatacatgcagtatctggccattcccgtcctgagcaagagaaatgaaatcatcgggcttatcgaaatcgccgttaaaaaaaatccgttcatttcgcccgtcaccatgctggaagcccatgaattggccgacgttaaatcatggttgtaccatttaaaggaccatttcctgttgtttcatgaaatagaacgcgccgtccgggatggattcccatgacggcagtacggacagaatagcctgctacgcccaacgccatatcccttaaaaatttcctgggatatatatattccagcctatttacaatcaactacttccatctttttaaccagaacggttaccgccatataatgctattaacctgtaagtgaaacagatagcacttgggccattttctgcatctgaaacaagaaagagaaaaccctgtaaactattgagtccacagggtttcaaaaaaggaatggtacttggactgggactcgaacccgggaccaatagattaaaagtctactgctctaccaactgagctacccaagcacttacccttgctggaagggcgcaagcagtaaacaccacaccccctttcatggcaagcgtaaaatggaagatggacaaaaaaagatcaggattccatgcattccagccatctcgcacgccattcggcaggaatacgcacaggacgcccctgcggcatctggaccagggctagctgctgatgagccctgaccagaagatcattattggaagcgcgcctcatttcaaaatcgcaccagaagcgggcccggtccacggattgaagccatcccgtcgtcaaaatggtgtctcccagaacggccggacgcacatagtcaatctcatggcgcaccactacggcaaactgctgcaaatcgctcatggttttgtaatccattcccaatttagcgccaagtttggtacggcaggcctcaatcatacgcaaataggccaggttatgaaccaccccgccgcagtccgtatcataaaacatgacttcatcttccgtatgaaacatcagctccggattcatgcctgccattgtaaaaaggaaacaggcgggctgaaagaaaattccggttcagccgcgccatgcatgatgcgtccgcgccagcgtcagcacgcagacggaagcagccccggagcggaggagcagacgggcgcaggagtctgccgtggctccggtcgtaaaaacatcatccaccagcagcacatccctgcccctgacggggctgcgtttcatccttttttcatccgccgcataaattttacgggcatgtctgagccgctgctcccgcgacaagctggcctggggaagcgtatccggcaggcgtttcagcacgccggcatacggccagcccagttcctctcccagcagaaccgccagttcctgcgcctggttgtacccccttcgagcctgtttgccgcggtgcatgggcacgggaacgatcaggcgttttttcccgccgaaccagtgaggatttccaagcactgcctctgccatcatctgcgcgaaggagccggccagatgaacggctcccccatatttgaaagccagcagaagatcccgcaataatcccgtattcacatacacggcacgggcttcttcaaaagaggggagagccgccgcgcagcggcggcataatccggacgggatgaaggaaccctccgccggttccccgcagacggcacagaagggaggctcgacaggcacgaaacttccgcggcagtccgggcaaacatggcagccatccaggccgccgcggccgcataactcgcagacaaaaggatacacccaggaaagccattccctggcaaccgccctcagcattccccgcacggcagaaagttgaaagaggctcctatcgtccgcccttcccatcgggggaatcggcgtcctcctcttccggcatctcttccagaagcttgtctatggtttcaatgaaacgccacgggcaccgcttgcgctggtatttacgccacagcacatcacgcagggtcacccagtgcgcccgcgttaattccacgtgttcccattccacatcgtcacgttccgcacggcccaccttgggggcgcactccagcttccatttgccggcatggtgacatgccctgtacaccagggttccctcttccgtgcgttctttccacgtgtgaacttccatggaggcgagtgtaaggaagaagcgtttcgggtaaagaggaattttttctagtcatccgcccttgcgcgattagtatggctccgtcatgaacgacactgaaatgatcgaatgccgcgagcctgcccttcaaatgcagcgcctcatcgccatcatgaaacgtctgcgcgcgccccacggctgcccctgggacgcggagcaaacccaccattccctgatttccaatatgatcgaggaagcctatgaagtcgtggacaccattcagcggaatgactggacgcagctgagggaagaattgggcgatgttttgcttcaagtggtttttcatgcggagattgcccaggaagcagggcgtttcgatttcaatgacgtggctgcggaagtaagcgaaaaactcgtccgccgccatccccacgtatttgcccagtccaaggcggacacgacggatgccgtattagctcagtgggacaagatcaaacgccgggaaaagggggcggaaacaaccccatacctgcatggaacaggcaaggggctgccgcccatgctccaggcatggaagctccagaaaaaagccgccaaagtaggatttgactgggcggacgcccaaggcgcccttgacaaggtgaaggaagaaaccgcggaatgcggggaaattctttccgcaccggaggaagacccccgcgtcgcggaagaattgggggatcttctgttttccgtagtcaacctgtgcaggaaaaaaggaatcgacccggaaacggccatggccggagcaaacagaaaatttgagcggcgtttcaacgaaatggaacggctgcttgccaaagacggtctttccctggaagaagcttctgcggaggccatggaggcacgctggcagcaggcaaaatccgcccggtaacggaatccggggtcaggccatcatgtccatgttcgggtctttccaggccggatcatatcccttggcatagctgaacacatgcttgtgcatgtattcgaagtactgctctttctgcatgggggtgagccgttcccaaatggctacattcaaggcacggcataccttctgcatcattttcagggtaagctggcgcccctgccgggctttttggacctgcttgtgggtaagctgctccggagaaatttccaccaggtcgtgattggtcagatgccagcgcttcatcagttcatccaaaggctgttctccgtggttgcgtccggttgctgtggcttcctcgtccatacgccttccttcgtgccctatttccgggaaataggcaatacatgattgccccatcagcactttttttgcatttccagttgcccggcgtccggatacatggttcaatcccgctccgttgcaataagatgattagcgagaaagaggaattactggaatggcgcaaacgcgccgccgcacagcccgcgggacgggtagtcctggatctggaggcagacagcctgcaccgctatcaggaaaaaatctgcctgatccaatatgcggacgaaacgggttcctgcctgattgaccctctctccatcgaagatatggggcctttctacaactggctgaaagaaacggaagtctggatgcacggagcggactacgatatgagcctctttcaaaacgcctgggaaacgctgcccgccatgatctgggatacgcagacggcggcgcgcctgctgggcttccgccagttcgggctggcagccctggtggaacacttccacggcatcaccctgagcaaatcttcccaaaaggcggactgggcgcggcgccccctttccccaaccatggtcacctacgccctgaacgacgtaaattacatgctggacatggcggacaaactgacggccgccctccgggaaaaaggacgcatgggctggtttgaagaaatttgcagacattccatggaacgcgcccgggaacgccatctggcagggcatcaggacccctggcgcatccagggctgcggcaaattgaacaggaaggggctggccgccctccgggaaatgtgcacctggcgtgatgcggaagccaaaacgtgggacaaacccgcgttcatggtttgctccaatgccgacctcatccagtggagcgtggctctccaggaacagcgcaccgtggcgcccccgccccgttttcatgcccacaggcgcagccggttcatgaatgcgctccagaaattctacctgctggatgaagaagactacccatgccggccccgcattcagcgccggcagcattccgaccaatttgaggacaatctggcccgcctgtgcaaactcagggatgaaaaagctgaagagctgggcatggaaggctccttcctgattacccgggcctctctggaagctattgcggaagacagggaaaaaggcatttccaccctgttgaactggcagaaggaagccctgggtttttaaacggtcctttctgaaaaggaaaaacatccggacggaagggccgttgtccccctctttccccattcacccagcatcatcgcccatccatcccggacggccaacacaagctttctccctgaacattcccggctttctgaaagcgttctccgctcagggcagacaggaacagaaattcttcccccgtaaacgccgtcttcccctgcctgtctatttacattgagcggaagacagttttttctataatgcagggcagttcccttcctccatgccctccaaccgccattcatacatggtcctggcaatcttctgcgtctgcgcccttgccatatgcgccttcctttcctggcggaaccaggagaaaaaagaccggctgtcgcggcagtacgcggaattttccatgccgcagacctcgaagggaagcacgccggcacaacagaaagccctgcttgaaatactcagcagagaacagaaaaatatttctcagactttcccgcaccgtcaacaggcggcagaaccgccgccccggagccaagaaaaaatcttcccccccccggcagggcatgctagggtggcaggcgatgaatcatgccgatttagaccagttgctgatccttcaggaaaaggatgtgcggatttccaaactccggaaggagctggcttccctgccggaacagagaacgcgcctgctgaagcagatggaggccatcaagcagaaggccctggccgccaaacaggaagtggcaggcattgaaaaaagcatacgggacgtggaggccgccgttgaaaccaaacgcgcctacatcggcaaaatgaaaacccttcagtccaacacccggaaaaacgaggaataccagatgtgcatccaggaggtggaaaaaacggaagccgctattgactctctggaaacctcagagctggaattgatggagcgcctggaaacagcaaaaacggacatggagcagaaaatccgccgtgtacgggacgcccagcgcgaactggaggaaacgctcgcgcgctttgaccggacagcagagacggacaaggagctcctaaaccgcttgaatgcggaacgcgcggatctggccgccgccgttccggaagattccctgggggaatatgaacggatgaccagaagcaagggggttccggtcattgtgccaatggatgaaaaaggccattgcggcggctgccacatggttatcacggacaacgcccgcatgaaagtgctgggcggccacgagaccgtttactgcgacagctgccaccgcatcctccactaaagaagtttccaggaacgccgccgggcttgccatgaaatccagatcggaagaatttgaagagtgggggacggaagtcatcttcggtcgtgccaagggattccgcgccgccatgatgcgcatgatcctgcgcggcgcctcctggctgttcaggctggtggttctggcacggctgtatctgtttcattccagcatcgccaggcaggccaggctgggaatgctggtggtcagcgtgggcaacatcaccgtgggaggaaccggaaaaaccccggtggtggaactgctggcccgcacccttacccggcgcggacgcaaagtagccatcctgacacgcggctacaagagcgcagaactggataaacctcaggaatggagggacaaggacggcaggctgccggaaaatcttcccaaaatcgccagcgacgggaaaacgcgctacctgggccccctgcattccggagatgaacctttcatgctcgccaaaaatctggacggcgtggcggtgctggtggataaaaaccgcatcaagtccggcatcttcgccattgagcacctggggtgcgacaccctgttgctggacgacggcatgcaatatttgaaactggcgcatgaactggatatcgtgctggtggattgcggcgcgccctttggcaccggagccatgctcccgcgcggcaccctgcgggaacccaggagcagtctggcgcgcgccagttacatcattctgaccaaatgcggcggaaagccacaggatgagctgatctccgccatcaggaagtacaatcccgtggcggacatcatcgtgagcgaccacggcccccggtatctggaaaatgtgttcacgggggaacgccttcctctggaggccctccgggggaaatgggtggcgtgcctcagcggcatcgcacgtccggaaagttttgaaaactccctgcgctccctgggcgcccacgtggaaatctgccgcaggtttccggactaccactggtttgaacaaacggaattgcaggaattttacgaccgctgcgcagaccgggccatggacatgatcgtaactacggagaaggatgccgtgcggctggaaaaaccggaggaaaaaccggaggtccctatctatttcctgcgcattgaggtggaaatttaccagggccgggaggcatgggaacgttgtgtagaccgcatctgcggaatttcagaaccgcgcccacgggatgaatggatgccttcctcatctttctgagcgagagcgcagcagcttgaagcaatacatcaagaaaattgtgagcatgcgttgcactttatcttgaagagaaatatttaaaaatacgccgccttttatttttttaactctttatttaaaatattcctgaaatgagtatcaaaaagttaaaaccattcatcacagtggccggcatcatgcttttgctcgcgtcggctgcaatgggttatttctccgctcaaaggctgtcttccatcattccggcgtccggttatgaagataaaggcgtttattccttcgtacctgttcgggtgcttcccgttcaggtggaaaataccggcgccaccggaagagcccgccgcatgaaccccactaaaaccgtttacgtggttcactaccgtgataccagcaaaaaaggctatcagtggaaattccaggcagctacccgcgaaacgggacaaaaaatcgtgaatcagagaattgccgtagagcggcgggtgctgagcatacctgccgacaagcattcctatatcaccatagaatcggaagagactgcagaaagctatacagcaaaacttcagcaaaagaatataatgatcctggccttctcaggaatctacattctgctctatgcagcgacatggggcgttattcttatgaaaaggcccaggaaagaggctcccgcgtcttgaaaagaaaaaggcagtttccccgaaaatgcgtctttatgccctcctgacaggaacgcggcagaactttgacggcgaacggcatgaagccaatcgcatatttactggaatccccggcgggtatgtcactccgtaagtgaagaatcccgctctttcattgtcgctgttcacattttgccacagccgcctgcatgcggaaagaatgacatttcccgagagtctgcggaaatccgccgcttttatgcagagaaggccgcttgacttgcccggaaaatcgtgtgaaacaaaaaggcagtattttcccatgaaggcatttaccatcacctccattctggctgctgcgtgcctatttccgtcctattcgccggccggagctgcagcagaaaacaagattcaggctgccccaatgcaaacggcggcaggcattcccaagcaggacccccagcttatccaggggaagctcgccaacggcctgacctacttcatccgcccgaatgcggaacccaagggccggttcagcatccgcctgcgcgtcaacacgggttccctgaatgaaacggatgacatccagggcgtttcccacttcctggaacacatggttttcaacggaagcacccatttcaagcgcggggaaatgattcccgccatgcagaaagaaggcctgggcctgggaggggacgcaaatgcgtacaccgcctttgacgaaaccgtgtacatgatggacgtgcccagcatgaaggaatccaccgtgcacctggctttcaccatcatgcgggattttgcggacggagccctgctggaagaaagcgccattgacgcggaacgcggcatcatcaccagcgaatacaaggtgcgcgactccgccggctaccgggtcatgaaggaagtcttttccatcatgctggacggaacccgcattcccgaccgttatcccatcggcacgctggaagtaatccgcaccgcgccgcgggaaaaatttatcaactattatcggacccactacgttcccagccaaatgcagctcgtcatcgccggggacatcacaccggaacagggaaaagcctgggtggaaaagtattttggctccatgaagaaggacaactattccttccagacggaccggggcacgcttaaaacggctacggaaactaccgcccactggattaccaacaaagaggccaccagcacggaagccagcatcaacatcgcccggccctatgtgaaaaagccggataccgtcgccaaccgcaacaaagatatccccctgaacgtggcttacgccatgctgaaccgccgtctggaaaagatggcgaagaatgcggactgcccctttatctctgcggaaggaggccgcatggacatagtggaagcggcggaagtggactccattcagacccaggcggactacaagaattggaaaccggctctggccgccattgaacaggaactgcgccgggccattgaattcggcttcaacagggaagaactggcggaggcccgcagcaacattaccgccgccgcggaaaacgccatcaagtcctgggccaccgccaagtcggaagacctggcttccgccatcacccagagcgccgcacggaacaaggtcttcaccacgccgcaggaagactgggccatctccagggaagtcgtggaaaacctgacgcccgaacaatgccaggcagccctgaaggaagcctggaccggagcctttccccgcgtgatcgtcacttccaataaggaaaacccccagggaagcgccgaaatcatgaacgcgtaccgggaatcccagaccgctaaagtacagccctaccaggcggacagccgcaaggatttttcctataagttcggggatcccggcaaggtgacggcccgtacggaaaccaccgacctgggagtcacccagctcaccctgtccaacggcgtgcgcgtcaacctgaagcccacggaatttgacaaggactccatcaacatcacctttgccgtggacggcggggaactgagcaggccggaaaaagcctccgggctggaactttttgcgaatgccgtcatgaacggcggcggtttgaaagaccactccaatgacgaactggccgccatcatggcaggcaagaaggtaggggtaggcttctccatgacggaccgcttcttcctgctttccggaaacaccaacagggaagacctggaaacgcaactccagctccagacggcctacctgatgcaccccggttaccgacaggacggcgttaccctgctccggcgggccattcccatgatttataacaagatggaccatgaagtgcagggagccatgaagaagcaggttcctgccatcctttacaggaacaatccccggttcaccttccccactcaggaacagcttacctcctaccaggtcaaggacgtgcgggactgggtggatgccccgttgaaaaacaactacatggaagtgaccgttacgggagacttcaggacggaagacatcatccccctgctggaatgcaccgtaggagcggttcccaaacgtgcggaagctccggcaacgctggatgaaacgcttcgccatccggccatggcggacttcaatttctccaaggacctgacctatgactcctccattgataaaacgatggtctgccttttctggaaaacgcccggcggagaaaataaaaagctggcccgcaggctgaacatgctcaaggccgtcttctatgaccgcgtattcaagggtctgcgcgaagacatgggggaaacctactccccttccaccggcctcaatatcagtgaaacctatccggacgacggctatatcatcacgatgagttccggtgtcatgcgcaataaggaggccgtgcgcagcgccatcgccagaattgcggacgacctcggcaagggaaatatcacccaggaggaactggaccgtgcccgcaatcccattcttaactccatggaccgcgcccagcgcgacaacggttactggacatccctgctgaaagactcccaggccaagccggaacggctgaaccagcagagggaaagcattccggacgtaaaagccatcaccgtggaagaggtcaacaaacttgccaaagacatcttcggcaagggagagcatctcaacctgaacattctgccagatcacccggctgcggaaactccgcctgctgaaaagcaggcggacaaagccgactctccccaggccgccgtctccccggcggctttttgcgttcgcgccaccgtcgtgaagacggtaaaaaaagactccggcaagaatggatatgccatcatcatttccgaagaaacagcttcaatgccggcctggaaggccgtggcggacaaactggctgaaaaacacggaggctccatcgtcaccgtgaaagattccgtattctccaagctggacacgctcaaaaaaatggctccacgtttcatggccgtcgtcgcacgcccggaggaaatagaccgggtgctggtgaatgacctgcaccgcctgagccgccggctggacgacgacccttacggggactgtatctggggcattgtcacggggtacaccccgcaggccgccatgagaatagcctctgaaacaaagcctctcgtcatcagccgcgccatgggaactaccaacgtggattcctcccgattcaaagacagcatgagcatcacggactggcagcccttccaatacctggaacagcatggctccaagggcaaggtaacgccggctttctacacgaaaggcctgaaagaacaggacaagggggatgaaaccacgctgggcgtaacgcccaagcttatggaatactggaaacgttattccccgcagctcttcgtaacggcctcccacgcaacccagtttaatctggaaatgcctttcggcaagggcctcatcgtttccggcaacaaccggttctacgcgctggacaaaaaacagttcagggaattcaccacttttttgcgcggcgtgctcttcaacgggaaggaagacgacctgctctccttccttaatagaattaaagcgccggtgattgaaaccaggccggttccggcagtctgggttgcggcggggaactgcttgatcggagatgccaagaagacaaaaaattccatggctgtcaccgccctgagccgctacggcttcaaccagctggtaggctacaccgtcccttcctggtatggcaagggcggctgggggacgctgggccttctgttcagcaatcatgacgcctccagcctggcggaagcctggtatttgaacaaccagttcattctggacgagaccatgacccgcttccccaagctcatggacgtccatttcaactccgcggatatcaatggaatcaagaatgatccggactttgccaggggcatgaactccgccggatacggcatgggcaaggaccagcttgggcttatccacgaccgggataccgtggccttttacggagaccccgcctggacggcgcgccttgacgaatcccgggctccgtccccgtggcatatcgactggaatgacccggcagatgcctccaaagggttcaccgtcacagccaacaaagacgccaaaggtcgcctgggagtctggttccccaatcggatcaactccggcaaggccaccgtcaccattggcggaaccgccactcccattgaaaaggcaggcctgctgaccaacgacttcctgctgctccgggaactggaactcaaaaagggagaaaaagccgtcgtggaaatgaaataagcatggaagaaaaacaagttgcagggatttttcccctgccgtcggcggccgaatatccggccgccgctctttttccatagacaagcagcctccaaacatggatactcccggtaatcaatccaccctatgactgattactccattttctttatcatcgccgtagtagcgacgggcgtgggagcgctcctgtttctcctgtccctgttcgggctgggggaacatgatctggactttgatgcggattccggcggagcggacgtagggttgctgtccatcaaatccggcatcggcttttttctgggcttcggctggggcggcgtgctcgcccagggtctggactgggggatggccgcctccctggcggcggcttttttcaccggcgtgctgatgttcctgattatcggcatctccatgcgtttcattatgagccttaaatcagacggcaccctgaattatgaaaccctcaagggaatgaccggctccgtttacatcagcattcccggaaacctccaacgcggcggacaagttacaatcgcccatcccagccagctgctgtacctccctgccgtccaggaaggggaacatcccctgccctctggaaccccggtggaagtggtagccgtcactgcgggaatcgtcaccgtcaaacctcttcattaacaaacaccccaatcatcataccccaagccgactatggacaaaatcatccccatcgccattctggttctcttcatcattctgaccgcttcctggctgttcagccgctaccgcatgtgccctccggacaaaatcctcatcgtcttcgggaaagtaggcacaggccagccggccaaatgttaccacggcggctccaccttcgtgcttccggttctccagtcctatagctacctggatctgaaccctatcaatattgacgtgcccctccagggcgccctttcctcccagaacatacgcgtggatgtgccctcctccttcatcgtgggcatctccacccttcctgaaatcatgcagaacgccgctgcgcgcctgctgggccgctcccgggaggaaatccgcaatttggccgcggaaatcatcatggggcagatgcgcgtggtgattgcctccatgaccattgaggaaatcaattccgaccgcgaaaaactcatcaagggcatcacggaaggcgtggacgtggaactgcacaaagtgggcctccatctcatcaacgccaatatcacggacatccaggacgcttccggctacatcaacgccctgggcaaggaagccgctgcgcgcgccatcaatgacgccaccatcaaggtggcggaagaaacgcgccgcggggaaatcggcaaagcggaagcggaaaaggaccagaccatccaggtggcgaacgcccgcgccatcgccattgaaggccagaacgaagcccagattaaaattgcggaatccgccgccaagctgcaagtgaagcaggcggaggccaaaaagctggcggaagtggcccagaaggtgcaggaggctaaaaccctggaagaagcctaccaggcggaaaaagaagcggaattgaagcgcgcggaacgcgaacgcgccacgcaggaagccaacatcctggtaacggcccgcattgaaaagagccagcgcgaagtgcaggcccaggccacggcggaagtactcaaactggaacaggaaggcaaggcgcaggctctgctcatccagcgcagggcggaagcggaagccatccgccaactggcggaaggcgaagcccaggctaccctcctgaagaaaaaggcggaaggggaaggcatggaaatggtgggacgcggtgaagcggccgcgattgaagccgtgctggaaggcaaggcccgcggttttcagcagatcgtccaggcggcaggttcttccgaggccgcttccaacctgctggtgacggaacagcttaccaagattgtggagctccagtccggtgccattaaggggttgaaattcgacaaggtagtcgtcatgggcaatggagggaactcctctgtgggaggattcgtccagaatctggtaaaggatacgctgccccttcatgaactcggcaaaagcgtagggttggaattgcccgcttttctgggcaaacccatggaagggaaaaccgcagcttcctcccctgctcccgcagccgatgccccggcggcagataccgcaaccaccgtcaacccgagttaacccctccatccccgccttcctgacggcaaccgccccgccacccagggaagcttccgaacggtgttccgggaattcccatggcagggaggagcggccgcctgacaacctctcccgtagccgcacagtcgaaacaagcggcataccgcattccgatcatagagaataagccggacatgccggtgaacccgcaggacagggaggcactagacagccttgttcatattgacgctggacgcatgccgcagcggaaaagcccacttaccgccagaaggtaaacagagtttgaaacatgaaaagagaatccgaatgcctgccttcaaacctaacgggcagatggcaaaacgccatattgattcattatccgtcattgagtattgttgattttccctgctcatggtacatatccgggcacgcatgagtgttctgcttcatatctgctgtgcgccctgttccatttcctgcattgaaatgctgcgggaagaaggaatggaaccaaccggattctggtttaatccaaacattcatccgtataaggaataccaggccagaaaggatacgctggtcgaatacgcggcaaaaatcggtctgaaattgattatgagggatgaatatggactgcggcccttcattcgcgccatttacccctccctggaaaaccgttgcggaacgtgttacaggatacgttttgaagagactgcacggtttgccgctgaaaacgggttcgacggcttttcttcaaccctgttcgtcagcccttaccagaatcatgaattactgagaaagaccgctgaaaaaacggcagagaaatttggaacccgtttcatttaccgtgatttccgccccggtttcagagaaggtcagcaaaaggccagggaactccggctgtacatgcagaagtattgcggatgcgtcttcagcgaagaggaacgttacctgaaaaagaaataactccattttaccaggcttttgccttttccccatgaccctgcagcagctaaaatatatcatcggcatcgtcaacagcggttccatcaatgaggctgccaaacggcttttcatatcccaacccagcttgtccaaagcggtccgggaactggaaaatgaattgaattttgagatcttccgccgttcttccaagggcatttccctgtctttggaagggacggaattcctttcctacgcgcgccaagttgtggaacaggcggaacttctggaacagcgttacctgaatacaaaacctctcaaacgccaattttccatctcgactcagcactacgctttcgccgtcaatgctttcgtcaatctcatcaaaaaactgaacatccaggagtacgaatggacactgagagaaacgagaaccttcgagatcattgaagatgtccatcaatcccggagcgacctgggtatcctgtatctgaatgatttcaacaggcaggttatcagcaagcttctcaaaaagaacgatctctgtttccatccccttttccgggcagaaccgcacgtctttgtcagttcggcacatcccctggcgcgccgcaggcaggttttactggaagatctggaagattacccctgcctcagttttgagcagggaacctataattccttttatttttcagaagaaattctcagcaccatcgttcacaggaaggaaatccatgtcagcgaccgggcgaccttgttcaatcttctgatagggctgaacggctataccatctgttccggagttctcagcgaggatttgaacggctcgaacattatttccataccgctcaaaaccaaggaatacatgctggtcgggtggattgacagggaacaatcccgcccaagccgttcagcccttctatatatagaagagctgaaacgggttatcaccgaatacggctatgaagtaatccggactgacgattaattccggatgatggaggcggtagcttcacaaatacggccggcgacatacgggttattcatcgtatacaggtgaatgccatctactccctgcgctacgagatcgataatctgctcgacggcgtaggcaatgccggcatcccgcattgcgatggggttatactcaaacctttccatcatacgtatgaatttcttcggcaaatggacatggcacagggaaaccatcctctctatctgctttttattgacgacgggcatgattcccgcttcaagagggacggaaatgcctgccagatccagtttttcccggtaggcgtgaaaaatatcgttgccaaagaacaactgtgaaatgagatggtccgctccggcctccaccttggtcttgaggtggcgaatatcatcgactatgctttttgattcgggatggccttccggatagcaggccgccagaatgtgaaaatttccctgttccttaataaaggaaataagatcgctggcataggtgaaatcacggcacggttctctgtccgggggcaaatcaccgcgaagggccaggatattttcaattccgttccggcggaactgttccagaagctccaacacatttcccttcgtcaagctgatacagggaagatgggctacgctctcaaccatataatccttcttgatggaggaggcgatgttaagcgtatcgcaggttcccgcgcctcccgaagcaccataggtcacgctgataaaatccgggttcaatccctgcaaagcgctcagagcatggtaaaccgtcccgatcggggaagtacgcttgggaggaaacacctcaaaggaaagaaccctcttttggggaaacaattcggaaagcttcatgactggaattccgtacgcagggctctggccgccgccgtcatatttttgaggctgcctatcgtttcctcattgccgcgcgtctttaacccgcaatcgggattgacccacagtttttccggtaaaatcttccgtagcatgcgatggagattttccataatttccgtctctccgggaatacggggcgaatggatatcataaactccggggccgatttcagtcttaaacccgcattctttcaaggcatcgagaatgtccagattggaacgggaagcttcgaatgtgatgacatcggcatccatggaatcgatttcccggataatagccgcaaattcgctatagcacatgtgcgtatgaatttgcgtttccggcctgaccccgctatgcacgaggcggaacgagggaatggcccagtccaggtactctccatgccagtcggaacgacgcagaggcaatttttctttcagggctgcttcatctatctggatgatgcctatgccatgctcttccaatgccagcacctccttgcggacagccagagcaatctgcagggcttgctcctctagggaaacgtcttctctggggaaagaccagttcaggatcgtgaccggccccgtcagcatgcccttgaccggtttgtttgtcaggctttgggcatagacggcgtactccacggtaatggggcgcatccaggaaacgtcctcccagacgatgggcggcttgacgcacctggttccgtaggactgtacccaggctttttccgtaaaaaggaagccctgcaggtgctcgccgaagtattccaccatgtcattgcgttcaaattctccatggacgagaacatccagtcctatcttttcctgcagggaaatgcattctttaatcctgtcaaagttgaattgcctgtactgctccccggaaatgaggttcttcctgaatgccgcccggttggagcggacttccgcagtctgggggaaggaacctattgtcgtcgtaggaaacaggggaaggcggaaacgggttttctgaagcttttcccgctcttcaaaagacgggaatctcgtaaaatcgtcaggcttcaaggcgaatacttccgcctggacagcagtattttttcctatcctgtccgactgaaacaaagcatcattgacttgataaatcttttctggctccgcgttctccagcgaaaaaagaaagctaaggtcccggagctcctgcagtttttcttcggcaaaagagaagtgtttcaaagcatattccggcagtttcgtctcctgagcgaccgtatagggaacatgcagaagggagcaggaagtccctatgcctatgcgggcacccgtttttttcaaatcggccagcaacgccagagtccgggaataatgattgcgccagatattcttcccgttgacgacgcctgcaagaagaagcttatctttcgggaaaccatattctttcaccagggacagcgactgctttccttccacaaaatccagtcctaccgcatcaatatccaatccggcaacctgttcatagcagtcgcggatatctccgaagtaggtttgaagaaggaccttcacccgcccctttgaaggcagcatggattcatacaagcggagaaacaggtcgatatcctgcctgtccaggtcacggacaagagcgggctcgtccaactgcacccatgccgcgtccagctcatggaaacgggccagaatagcggcatacacccgggccaactccccggcgacactctcccgcgtgcgtccccccgccaatgaggaaagcgttaagaatgtaaacggcccaatcaggacgggcttcgtttcaatcccgtatgaccgggcttcaaggaattcgtcaaagggtttactcccggaaatctgaaggggggcggaatctatctcgggaaccaggtaatggtaattggtattaaaccattttttcatggctagagccttgacatccccagccggcccctgatagccgcgagccatcgcgaaataagtatccaatgaagaaattcccaaatcccggtaccgctggggaaccgcatttaacaaaaccgcagtatctagcatctggtcgtaaaaagaaaaatcattggaagggatgccgtcaatgcctgcctccatttgtttctgccagtgcatcctgcgaaggcggcttcccgtctccaacaacgcctccggtgccattttcccccggaaatactgttccacggcaactttgagttcccgtgacgagcctattctgggatatcctgcaactgatgttttcatggtatttttcaatctgtaatgaaatgcaggcttcttatagcaaatagcgttattattcgataatacaattattctatggcataatataacaaaaagctataacaaattactgcttgcaggttcattgacaagaaaccggaagcaggttaggatacggctttcaacctctcttcgactaatgaatatcaaatccgcccttttgacgctcgccgcagccctcgctctctcctcctgcaatacgatcagtggaataggaaaagacgtagaagccatgggaagcaagattgacagcgcctcccaggccaccagcaagtccatgcagtaaggcccgggaagcgccggacgctgcttcgagtcctcttttaatggaaaagaggcagtactttgcttcctgccattctgccctgaatggcagtcatccccatgggattcccaacgaattggcaagatccggctccatcctgcatggaacacgccaaacctttgcggccatctgtaaatcaggacatgcgggcggcagcacattttttaccggaaagccgcttcatccacccggatgaagcggctttcgtccaaggtctctacatgacctttttacatggcccggctggtggaacgggcggcggaattaatgtcgctgccgaccgcttccacatccttgcccaccccgcctatcgtattgcaggaaacgcaccccagaagggtggcgatactcagaataatcaatttgcttttcatcgttttattggaagagttccgagtaatcagactctattcctccgccccccgttcaaagaaccggcaatcatgccacgaagccccctgtcattctccgttcttgccatgcgttcccaaaacacttaaaaaacatgcgccaaaggaaaaaaatgccgggtggacattccgccccattaggaaccattactatttactaccaagatgattaaagtagccatcgtaggatacggcaacatcgggaaatacgctgtggacgccttgcgcgccgctcccgatatggaactggcaggtatcgtgcgccgccccggcagcgaagctgtacacggcatcaagaccgtaagcgacgtggaggaactgggccatgtggacgcggccctgctctgcacccccacccgcagcgtggaagaaacggctctgcccctgctcgcccgcggcatcaacacagttgacagcttcgatattcacggggacatcgtggccctgcgccgttccctgggagcccaggcaatcaagcatgacgccgtctccatcatttccgccggctgggatcccggaacggactccgtcatccgtaccctgatgctggccatggctcccaaaggcatcacgtacaccaacttcggccccggcatgagcatgggccacagcgtcgtggcgcgttccaaggaaggagtggcggacgctctttccctcaccatccccacgggttccggcgtacaccgccgcatggtttatgtggtgctgaaagaaggagccaaattctccgacgtggaattcgccattaaatcagattcctatttcagccatgacgacacccgcgtgctgcaggtgcccgacatcgacgtgctgaaagacatgggccacggcgtgctgatggaacgcaagggcgtttccggctccacgcagaaccagatgttcacgtttgaaatgcgcatcaacaatccggccctgaccgcccaggtcatggtggcttccgcccgcgccagcatgaaactggccgcaggctgctatacgctgccggaaattgccccgatggattttctgccgggcgaccgcgaagaattgattgcccagctggtctaacccggagcattccggacacacggtaccaggggcgctcctgccgcccctgttccgcgggccttcctttatcctccggttgaggaccggaggatttttattgctccacaacgaccagcctgccattgacggccttcacccgggccggagtacgggttcgttccgtccagtcccacgctcgggccatgtccgcccaaaaggcggcgtggggagaatccttttcctctgacaaacgcgccggagtgggcacgaagggataaatctgcacgggaacgtttttttgcccatgaaccagagcttgttccaccatggtataaatctcctcaattccggaatcggtcatcgccagacagccgatggaaacatcccgtccatgcaccatgatgaagcttcccgtccggttcagggaacggtcataggcattcggatacccgatgttgaaagacaaatggtaattgctccggggattaagcccggacggttccacttcataaaaaccttccggtgtttgcctgtccccttccttctccttggggcccagttttccggaccatgcggcaatcggatagcgcttggcaagcatgtagcattccgatttgtccggtttcacccacagttccaggacggagtcttcctttacggcccgtaaaaacacaggacttcccaccctggcgccgcacggctccagaaaggaattcagcacgggcgttacccgtttccgcgcgatatccgcacggttggaggatttttctgcacatgccatattgaaaaccgctacggcggaaaccagcagaaccagccccagcaaggacaagactacattcttcttcataaatcatctataatggcggcttttgttttgacaagcagaaaaccggccgtttctctccgaagaaggaaaaggaaaaaacggcggaaaaagaagacggaaagaaaagcggttcctgagaaaggcgcccttcccgaagctgtccccggttagaagccatgtctgtgctggaaatgcaggctccggagaagtattatcggccctcagaacatcagcggaagaccgacctataaacgccatggaaataagcaaccttcttcccatcactacacggaaggaattaagaatatggctggaaaacaaccacctcacttcctcctgctgctgggttctcacaacgaggaaaccttccccacatgccctcctttacctggatgccgtggaggaagccctgtgcttcggatggattgacagcacccgcaagaagacggcctccggtttcctggcccagcgtctcactccccgatccagaaagagtaaatggtccgaactgaacaaggaacgcgtccgccgcctggccaggctgggactaatgacgccccacggcgaaaaatgtctgccggaaatgaatccggaagcgttccgtattgacccatatattttacagctccttcaacaggatccgcttatttacgccaattttctggcgtttccccggctataccgccatgtgcgcctggataccattcaaattaaaaaaaaccagccggaactgttccgcaagcgcctggaaaaatttctggagaatacccgtgaaaacaggatgtacggagaatggcacgacggaggacggctgctggaaaagtagacgccaagctcccgccatttccctgccggacgagccctgacgttaccaggccgctctggagttgttccggaacggctctggagggtcaggaggaaggcctttcgggggtgggggccccctccttgtgttttctttcttgttagaagtcgtagcggtagccgacgcttccgttcagcgcgctggacccgtcacggatgtccgcgttcccgttcacgtagatggttcccttcgttcctacaggcacgctcagtccggctcccagctgcagcgccgtcgttcccactttcgctcccctcacgctttgcgcaaagccggggttgcccagcagagagacgttcgtttcccctctccggtctcccaggtcctgcgccgcgtttactcggatttccgccagcgcttctcgtccgaagatgttgctgcccaccaggcccatccaccggccgcccagcgccagcgtccccgtcgtccagtcctgcctgccgacgttcaggcccgcgttgcccgcacccgtttcctcatagccgtccatccgcgtcgtcaccaccgaggcgttgaacagcggctgcagcacgctgctgcggttttcgttgaggtacacgtcgtaggtgagttcatacatcgctccaaagccccacccgctggtgcttccctgcgtcccgtagcttccttccccgtagttgaccgtacggttgagtttcgcgtcgttccaccctcccgtcaggatgagcgtgtgcgcccagcgcctgtcctggtaacggccgaagaggctggcgtagtagctgtccaggtgcccgtcggcgctgtccgccgcgccggccgtcaggtcgccgtagttggccgtgaaggccgctcccaccgtgaggcggtcgctgaggctcgcgtccatgcctaccgtgcctccccaggtggtgagctggtagccgctttcatccccgcgggtgtccagtttggcgtaggagcccgtgccttccatccacatgtggaagcgggggaggtcgtcgttgacgtaggccgggttgacgcccatgagggtggtccggttcctgatccagcccatctggtcgcgcagggcgtccctctgtgccgtccccagcgcgttgaccgtgctcccagctgccgccgccagggaacgcctggctgcggaaggattattgagcatatcgttattgagggcgcccaggaaatccgtgacggcctggtctatggaaccatgcctggcagcatcccaaagcagattggcgcccgccatggaattggccgtgtccgctacgctggcataaacgttatctgtctgttcttccgctttcagaaccaccttatctccttcctgcaccagatgggcattcttgtaataggtgaggaaaaggcctccgactgtcagcgtattttctcccaggtcaatcgttccgtcgccggtgagttccatcagcgtaagttccatcggattgcccgatttccaggtgatattgacatccgggattgaggtgacatggaaagaggcgccatcttcaatgacaacgtcgccggaggcctcaatgaagctggcggtcatgtcggcatcagtattcaaggtgaaggtggtggaggatccgctgctgaaggaagcgttctctacgctcagagtggtattgaccgccgtcagggagttgtcgctggcctggatggtcaggttgccgctattgaccagattaccgtaactgagacgggctccgtccacatccgccttgccctggagaaccagattccctccgctgattgtcagaccggtatccgcgccggagctgcgcaaaacctgcgttcccgctccggaaacatccagcgttccttctcccagcgttccttcatatgtatgcgtctgaccggaagctgcctgaatttgcaaagtctgcccattcagttccaaggaaccggagccgttcagtccgccggcagagccgtctgcctccaggctcagggaaccgtccaggtccagcaccacgccggaaagcgtactgtccacagccagccccaaagaggcgccttccgcaatagccagcgtaccggttccggcaatttccgtatgggaaaggccgtcggtagcgcctgtcagcgtcaatgttccggaagaagcgatatccagctttccgccgttgtcgccgcctgccagcgtccgggccgtcgcgcggcctcctactccaatcaccgcaggagagtccgcatccgcggaattaagatgcagagcttccacgtcagccgtaccgttaagctgaagcgttccttcttccgcaatgatatccccggccagcgtcacattcccggacagggtgagtttgttcgctcccgttttgacgaggtccgtgttggccgcagcaccgttcaggccgctgatgtccccggcaaaagaggtatccactcccgtgccttcatggaagaggttgttttgaagttcgatgcttcccttatcctccgccgtattggtgacgatcaggttgcccgtgcccgtctggcccgggccagttcccggtgcggtcaggtttttgatcaccatggaaccgtccgactggacataaaggtcttgatccacaatgacggcctggtagaaattgagggactggtccgtgaccggattgtccgcgctgcccgtaccatccacggaagacacgtaaaccagatccgtatcaccggagaggacgatgctgcctccgttgacgcccacgatgccgaagcccagcgcagcaaaaagcgggttagccgtcacgtggctcttaagcgtttcaagatcctgtgcaaaaccgccattggtcagaagtatctccagatttccggccgccgttttcatggcatccataacgctggtgagatccagcgtaagcgtggagccgtctccaaaggagatgctgcccagattatcccccgtgccctcaaactgaatcagaaagacctctcccgagaaggggtctccggaaatattgcccgctcccaccgcaagactgctgtccgtgccgttcaccgtccagatggaaccctgcttaagtccggtgagctgcgttccggcagaagcggtgacaactgaccccagcccggcggcatccagacctcccagggcaatattgccggaatcggcaaccgcattgacatggatcttgtttgtatccgttcccgcgtagctcccggcgttcgccagcgctccggactgaataagtatattagtggcggcggccgctccggaaaggtccagcgtgcccttggccagcgtcagcgtccccgtcaggccgttggcacggtcccccactgcaaaagagccggaagtgctgaccgtaagattgcctgctccggcaatggttccggcccaggcggcgttgtccccggttccgtcgcccagctggacagaggaattctgggcaatattcaactctcccgtggtcgtattcgccccggtaagaaccagcttgtcgcttccctgaacgctcagggaagccgtatcaatcacattcccggcataaagcaggttccctgccgtacccgtgtagttgacgcggtaggttccggctcctcccagggaaactgccttgatgaattcacccgtatccagcgtggccgccgcaccgccgttgccaaaggaaaggatggcattcccacggccggaatgcaccgttcccgcaaaaccggtgagatcccccgtcaaaatggccgtcagagtcgggtctccggccgccgttactccgaggttggcccccgcctcgctcgtcaggcttcccgccagaatcagcgtctggttggaattgccgttcagccatcccccagcggccatcacatggatatcggcattaacgggatcggcggcggaattgacaaaaaagccgcgcccatccagttccagcctggcgctgccgattgcagcggcattggcaaagccgacttcattccacgcagcgttggtgccgttgcccgccagtctcatggtaccggtaaagccgctgttgtctccggtaacggaatagcggccgccgccggggaaggtacctccttccttcttcccgagaaccagcgttccggctccggtaatgcggcctgacaaagtatccgtatttacggagttatgggcacggttgtcctgtatctggagagtcgcgttttcagcgatggaaatgtttccgctccaggttcgcgtaacattgttgtctccgatgttatagaacagagtccctccgcttacggtgatggcgccggcaaaggttcctccttgtattgtattgatagtcagcatgccgtctccaagcttgacgatatccttgtctcccagttcctgggtgtatgtagcccaagacacatgattgccgttcgtattcactcggatggcatccgtgctggcggctgaattaatgagcccggaaatatcctgcgtggcccccgttccatatgtgaaggtgccccctccaaaaataatcttgttggccgctaccagtcccagcgttccttccgtcgtgccgaccgtattcaacaccagttcccccccgttcagcgtcaccgtaccggtgcccagcccctggacggcattgaggttgagggtgccggccataatggtcgtgccgccggagaacgtatttgttccagtattttcaatggtcagcaccccctctccccgtttaatgagggacatcggatctgctccgtccacaagggcccctgttcccgtgaacgtgtaggccgtttctccattgttgaccgtaagacgcgcggaagaaacattcccttctatggtgacggcagaggcggatatgccagccagatcttcaaaattggcggatttggcggcgtcataaacgactgccgtcccgtctttgtccagccagacggcagaacctcctgccgccatccagatacccgcatttcctccgttccagttgagggcttctcccaacgccttgacacgcaggtaaagagtgtttccagacaactccagggcgtaggtataatcttcggaaaggccgctggaatcaaaagaaaaattgctggccgtcaacgtaccgaaactgcccgccgtaatcagcctgtagtcattttccatcgtctggtccaccccgctgatcgccaaggtcaacgtgccttccgtattaaaggagagcgtgcctcccgactggacgatggcagagctggaggaattcagacccgtcaaatccagcgtcagaacggaagacggggaaagagtcatattgcccgcagaggtaagacgggctccggagcccatcgtaatggagttgccgaaggtcactccgccggcaagcccgaaactgagctccccagaggaaaccgtcagcgcattcgcaaagccggtggaagagctgagcgtgagcttgcccgctccgctcttggtaaaagcactgcggccgtccagcaccgttgcgttggcaataacggcatccgtcccttctccagcggaaatttcgtcaaacccggaaatggaggcgtttgtgaacatgtccgcgcgcgtcacgccgttcaggttcaacacgctcctggtgaccgtatctccctgcccctgaccggaaagagttgtcgttccggtaaaaatggcgtcattgcccgtaatagtcacgttggccagctccgtggtcagggaagtgctgttaacttttcggccgcctgcataaatagaggcattattgaacgttccaccgctgatggaaaggttggcttccccaatcgtcaatgcggaactggaagagtttctttccacataagttcccagagagatttgcgcgccatcgaatgtgccgcccgtaatagtaatattggtggaaccgatattcccggtaagggcggcggtagctgttccattaatgtaggagccgccccagatttgtcccgtatatgtcccggacttgaaggtcaggttggtggaacctgtaatattcaacgtgcttgctcccgtttccacccagcttccccccgcaatcatggctgccacggtgccgctgcccaagtccagcgtcatattggtatccgccaggttccaggtagacgtgcttaaatgggcgcctgcaaatattttttttgtcccgtctccggaaaaaacagctcctgtgatcgttgtcgccacgccctgcgaaaacaaactctgggcaaaagtcccccccgtgatttccacggaagcggacgaatgctccgcaatatttgcggcagaacctgaggatgtcgcatcggacaggccatatacattcgcgttgtactggcctcccgtaatgcttaacctggccgtacaggcattcgttccatctcccaactgcacttggcctcttcccagaagagcgacggagccgttaaaagttcccccgtccagattcagggagacattgccgacgatggtcgatttctgccccgccccgcgtgtcgttccagccgttaccagctgggcgaaagtcccgccgtcaatggtgaatgtcacgtcccccgtgtggcggaaggattcctgccccagccctatgcaccagttgccgctggggttggagaccgaaattccggcccattccccgccatgaatgttgacggtatatgtccccgtcgtctggtaagcatcatttttatttccatcccccaccagggaaaaaccattaatcgtgccggcattccggtctacattgagggtaatatcggcggacacaatccggtcctggttgctccaccccatcaactgggcatttgtattcaacagggatgttccttccccgatattgattacaaaggaattggttcctccgatggtgacgccggaggcagtgcccgcaatattccataattgcagttttgtataggttcctccctccagattgagaacccggttatagccggcttcataggttccgcctgccgtaatatccgttaggttaataccgccgggagaatccgcctgagtcacgggctccccttccggaggcgtaattgtgtattggccgtcggcaaaggaaatcgtcgtttctccattgcccgtcaacgtatagtcagaccatgacggagaaatgaaacaggccagaagagcggataaaagaaccaggggcaagcgcggtcgcataacactataacgtattgataatgaataaaattatttacaagactatatacttgttaatagttaacggatttgaaatccggagtcaatgacaatttttgaggccaagccctttaggagcatggaacggcctgaaaggggaaagagagaaaacgggggtgtccgtttcaagaatcggcattattaatattttaatcattatctggactcatttatatcatttacggatttcaaatccgtccggttatttaacctgtttctcccagcaagcgaatcccgcatgcaggaaaaaatgatttcttgtcttgcattcccatgggagtgcctgtataagcctctacgtccccgccgtaaggcagggacggcatccaaggtcatggagcggtagctcagttcggttagagcgccagcctgtcacgctggaggtcgcgggttcgagccccgtccgcttcgccaccttgttcaggaaaaacagccgcctccgggcggcttttttgcgtccagaaaacctgaatcccggaaaacaggccgccccccgggaatgttttactggaaaaaggggccggaccccggtagaatgggggccagcattacaatcatgagcatactttcggaccgtctttccgaggaaatactgcaagcccgccagcgcgtctacaccgttggcgaaccgactcctctccagcgattgaatctgccgggcatcaaggccccggtatacgccaaaagggaggatctggggcccatccgggcttataagtggcgcggagcgtttaattgcatggccgcattgagccaggaagcccgtgacaaaggcattgtggcggcttccgccggcaatcacgcccagggcgtagcactggcggccagagtgctgaactgccatgccaccattttcatgccgcgctccacgccggaagtgaagcagacggaagtgcgccgccacggcggcaggcatgtgaagatcacgctccatggggactgctatgacgagacggccgcagccgcccatgaatacacggaaacccacggctgcacttttgtccatccttatgacgacctggtgaccatggccggacagggaacgctggcggacgaagtggtgatgagcggagaaggcccttttgaccgcgcgtacgttgccatcggcggcggcggcctggccgcatccgtggcgtgctggctgaaaaaattctggccccatatcaaggtcatcggcgtggaaggcatcgaccaggcgtccatgaaaacttccattgagcagggacgccgggtgaatctggattacgtggatgtcttctgcgacggcacagccgtccacatccccggagaattaacctatcctctttgccgggaactggttgacgagttcgtgaccgtgaccaataatgaggtctgccaggccatccgggccatgtgggaatcctcccgcgtcgtgccggaaccatccggagccatgagcctggcaggattcctgaaacaatggaaccggggcgaagtaaagccggaggaaaagagtttcgtggtcatttccggagccaatatggatttcacccaccttacccagattgcccggcaggcgggcatcggcaaccatgaaacgcgctatctgcgcatttccatggattccaagcgcggacaggtgcttaaatacctgcgccacattccgcaggatacgacgctggtggatgtgcaatacggcaaaacggagggaaacacccagcaccccgtgttcggcattgccgcttccgatgaagacctgaataccatccgcacgacactgaaaaagaaaggaatcagattcgaagacatcagcgaggacgacgacgtgcgcttccgcatgattcactaccagccggaactgtgtcaacaccccctgttcgtccacattgaatttccggaacgcgccggcgccttccttgacttcatggaacgtatcgcggatctggcttccctctgttatttcaactatacctacaccggggaacgcgtaggccgcgccctggtgggcatggaatttgatacagcggaagaccgggaaaccatccggaaacgcatgggcgccttttccaaaaacattatcaggtccattcgggaaatttcccccgaggctttccagaggatcatgggaagcagacagttgacaggcaatcattgacaccccatcatccagggagcttgagaaaaatcggctccctgtttttcatgaccgctttctcctcccatgattccgcccgtcatcctggcctcccaatcgccccggcggcgtgaattgctggagaaaaccggcattcctttttccattattgtccggggtacggaagaactgaaagaggcttccatgcccccgcaggaactctgcctgcacaatgccgccgccaaggcggaagccgtgttccgggaacatccggattccaccgtcatcggcgcggatacgctcgtttttctggaaggcttccctcttggcaagccggaagatgaagaagaagcccggtccatgctccggaagctgtccggacgcacccaccatgtctgcacggcggttgccatccgttccccgctgggcatgaaaaacctggccgtgctgacggaagtaacgttccggaagctgacggaaaaagacatccgccattacatggaactggtggacgtgatggacaaggccggctcttacgcgttccaggaacacggggagatgattatttcctccgtgcgcggggatacggacaacgtcatcggactgcctgtcagggatgtgatgaaatgcctgaacggcctgggataccgggcttgacccgtccaggaatccggatactgtctccggaagaaaaaacgcttcccgccccggaacggccttcggaatgcaaggcaaagccccaggcttcaggaacagggtattacctgtctgccaggaatgactccagtttattgtaaaaggccacaggaagcacggcttccagcaaggtcccttcctctacatattccgtagagaaaaccttgccttcactatgcatggcggccaccaggtcgctacgggtatagggaatcaggaaccgggcgcgccggacacggctttccagcatttccacgcaggcattcagcaggtctccctcaccattcccttctttcacggacatgggaaccaccctgccgctgaaatgaggcgccagcagcgtttccagggccccgcgccgttcttccggcaccaggtccaccttgtttagaaccacgatcatgggcttgtcacccgcacccagttcattgagaacctccagagtcgtttcataatggcgcacggcttccggatcggaagcgtccaccacctgaatcaggaaatccgccagaacggcttcctccagcgtggacttgaacgcttccaccagacggtgcggaaggttgcggatgaagcccacggtatccgtcaacagcagcggctgcccatggggaagctctatcttccgcgttgtggtgtccagcgtggcaaaaagcatatccctggccatgacttcagacccggacaccagggacaggagggaggattttccggcattggtataacctacaatggcggccgtggcgacagcctggcgctcccgttccttgcgctgcgtggcacgctgacgggtcaccaggaccagttccctttgaatagcctcaattctggcgcgcgccagacgacgatctacttcaatctgcttttccccttcccccctggcggctccgccgcctcctttgccgccgccggagcccccgccctggcggtccaggtggttccacatgcgggccatgcgcggcagggaatactgcatgcgggccagttccacctgcagggtggcttcccgtgtccgggcgcgcctggcaaagatgtccagaatgacctcttcacggtcaatgacgcattcgtcaacaagccgttcccattccctctgctgggaaggggagagcatattgtcaaaaacaacgcaatccgcccggcaatccagtgccagctgcttcacttcctgcgcctttccggtgccgcacaggaatttggcgtgcatgtccctggacttgatgaggtgcttccctgcgatgccgatgccgagattggagacaaggtcttccagctcatccagcatggcctgtttttccccagcctcggagggatcgaagtaaatggaaacgagcatggcccgttccaccatttccggtttttcgcggatttcaaacatataggaaacttaacggaattgcttgctggaggtaggctggtaatccttcagagcgaagtccgcgggcttatgacaatcacaactgcatgaagagaggaagccggccacgcatgccagcgtcagaaagctgatcagtctcatgcggctatgagacccgcacgaagtaccctaggcaagcaaattttacttcatcaccattacttttctccaaatctggaacaaaggcatttgcccggacggttttccttttttccagcccgtgggcagccagcaaagcacgcggcgggggcagaaacctgccggcggcagcaatccgccgcctttcaagggactttattcccttcctgaatcaacttgattttccatcgtctcccggcagcccttcctccgcctccagactgttcatccataaattccatttttcaatgaaagagcggtccatctgaagcaatgctttttcctgctgtgcggcggaaatggttcccgtcagcctgccaaaaataagcaaaggcttggaatacgtatccgccagggaagaaaattccgcaggctgcttctggcggcattcccgcgccagagcatgcagggagttgaacgtaagctcgttccaactgacctggtacgcaccgcttccttcccggctgtcctgaggctccacggtcagcagatgccccttcattcctttcaggcgcaccctggagccatctctgagcaccagagttttccccggtttcttttccagcagtgcgggcaaaagtctctccatgcgggagaacaatggaagcatctggtccgtcatttcccggcgcatggccaggcgggctttcaccgcaggagaggaaatgactttttccgcctctccataaacagtggaaactttctcataatcaccggtttccttcatgatgccctccccttcccggcagacgtcttcataacttctggattgggcggccagcagaatttccctcctcttttcctcctccagttttttttgcctctcttccgcctttttcctttcagacgccttcacggcttccgcagcctcccagtcccgcgcagcctggtactgcatcctcaaatgatccagtattccttccagcgcggcataagccggagacatggaaggaacttccccgctgaccatctgttcccgcaggaagtccgccgcggaccgtttggcctctacttcagccaccgttttttccggcatgtcctgaagacgtttcaagcgcgcgtactggtccgtatacctctccaggttgctgagccacgcggaagccagctcacggacgttcctgtcccggtcatccgccgcatcagcggccacccgatccagaaagccgccgtattccgtccatctcccggcaaagtaccaggatttcagcgccatgcccacataataatgcacggccaggtcagaattggagcgcagccccggcatccgggaagaccagtccgcggagctcaggtacatgaccaggttgccaatatccctggaacgttccagttcctcagggtccccgcaggcttccatctttccgcccagttcttccagacgctccaccccttccgggaactggccgcgcacccacatgcacagaacctggttcaaaccggcccaaagggatgtggacaaggggcagtccggctgagccgccaaatcgccgaacatggcggcagctttcaccagatccccccggttcagggattcctgggcttcgttaaacagtttgccgaagcggatgctgcgctccagccgcgattccgccgcccccctgtcttccagggctgcttccgccgcaagagaaatgggcgaaggcggagttgcgggagaaggagttccatcctcccgccattccgtccatccccaaacgcccaacgccagcgccactacggaagcaatggaggaggcaacgatgatgcggcatttcctgcgccgtgcgcgccgggcaaccaccgcgcgccgttccgcccaggtgagaccggattcctgcatggcccgggcgtattcctcctgcgcctgtgccacggcatccatcaattcgggataggaagagaacctgtcttccctgtcaaaagccatcagcctgtccacaatgaaacaggtcattggagaaacgtcgttcaccacctgctccaggcgagggagatttttcttgttctccagaagaatatcggaagactgggaagcgtccacacggggaggcgcacctgccagcaaatggtacatggtagcacccaaagcgtacatgtccgtacggaagtcctcctctcctcgcaacagcgtttccggcgcggcgtaataaggagtcacccatatttcccgctccatgtcggattcactatgaagcagggacaggccgaaatccacgattttggcggctccgtcgggggacaaaagaacgttggcgggcttgatatccctgtgcatgaggcccgcattccatgcggcatccagcccgcgcacgatatccagcgtcaggcgcagcaccctgtcttccggcacacgttcctccgcagcaatcagggcatccaggccattgccctccaccagctccatggcaatgtaaaaaaggccctggtcacgtccgacggcataaagctgcaccaggttttcatgggaaacccgcgccatgatccgggcctcccgttcaaaacgttcgcagcgcagggcatccccggcataagtatcattcagcactttcagggccacttcccgccccagaacggcatcctccgcccggaacaccacgctcatgccgccttttcccagttttccggtaatacgataaggccccatgcgcgtttttacacgcgtcagcgcctggcagcccgggcaaatggcgttggcgtacggaggcagcagggaaacatccatgggctgtccgcacgccgggcaattgacgatgttttcttgctggggaatcatgaacgcagggcggcggaacgggaatcagaaaaaaggaaggaggaaaaacggcgcggattgtccgtccccccctccgaatatgagcagggagggactccagccaggatccctcccgcaaatttgattaatcccgtcaggagagagccggaagggaagcggcggctacggcctgtccgtggcgcttggtcttttcatccggcacgcggagctggatcttcagctcggggaattcggtgcgcagcacttcttccgccttgtcaatgatgatctggccgccgtctccggaagccacacggcccaggaagagcaggttgcggatatcatagaacctggcgtaatgggcaatggcatagccgaagtgcacgccgatggtttcataaatcttgcgggcgcgttcgtcgccttccgccatggcggcctgaacctttttaagctgttccgggaagggcattccttcaaactggaaaccggcgcggggggccaggcgggccacagcctgctgggagaagtaaagggcgcctacgcccatatccttggaccattcgtccactccaccttcctccgagtagtccacaggggcgaaagccagttcattcagccagggcttgatgtggccttccggatccacgtagccggcggcctcggaggtgcccatggccacgccgagcacggcgttatcgttcatgcccatggcccctgcgagggcggtgacttcaccgtcattcaccacttcaaagggaatgttgttccatttttccttctggagggtgcggaataccttgccgagagtcttttcaatgtcttcctggctgacgccgcggaacagggaggaggtgcgtacttcactgttgatgatcacgccggcggaggatccgccgatggcgtccacccgggggagatgagcggcggcgcgttccagagaatcctgaattccgtcaatgtgatactgggggtccttctggaagtaagggtcccagaccacttcctcggaataaaccacttccccattcaccacggcagcgcatttgcggtcggaaccgcccaggtcaaaaccgatgcggcagccgtccaggttgcggcccagtgtcatggagccggagtattcctcgggaagttcttccacggaaacctttttcacttcaatcggggagccgtaaatcttcttgccgatgaaatcccagtcagattcgcggataccgcccttgcaatagcgggaggccagcatgtccgcaatagcgtcatccccggcgacgaggatgatattgccacccttctgccacagcaggaatttcacaatgcgctccacataggtctcattcagggcaatgttttctccggtatggggaagaagcttgccggaccagcggaaacaggtcccgtcattgcgggtcagagcgatatccacttgatgagaagcgggatcggcggcggctttggcctcaaaagcttgattccaaagaacggccggcacgaagccgggatccagcacaggggtgattttgggttgaatattcatggcgataatccgttggaaacgtagcatacccgcttttccttgaaaagtattcattccctttcctgatgattttttttgcggaatgaggggagatagctcattttctgctggaaaatcaccgtgtttccactaaagagacaggagcttttcttccggcgcggtactctggaagggcggcccattccacacatgcctattccatgaatgaattaacggaccagctcattaccctgttctcttccatcctgattaccgtcatgttcctcgccgtggcggtaaacatattccgccggaatcatgcgcctgatacccggcatccgctgaaatggcgtattcccgtaggccatctggacatgctggacatcgccatgtgcggcatcattgtgctttacttcagcctgggggccctgttggcggcagccacgcctccgggggcttccgctccgcccagcacaaccaacatggagctggacagctacaaggttttcaacggaacctgcctgaatctcattctggccttcgtcctgctggtgcgcatgttccatacgggccggatggaggcgctgggattgaaaaaacattccctgaaagtcctcctctacgctccggcggcaggttatctgctggtgctggccatccacttcctgctggacaaggcgggcctgttccagtggattgaacacgccaccaacgccccggccgaacaatccattgtttccgtgctgaggcactccagcgacattcccctgatcacggttatctgcttcagcgccgccatcgccgcccctctggtggaggaacttattttccgcggttatctgtacccgatcatgaaaaaatacacgggcgtctggtttgccctgatcaccacctccctcctcttcggcatcatccacgtcagcctggttccgttcatccccctggcaatcttcggagccgtactggtgctgctgtacgaatacacgggcagcatctggacgcccatcatcgcccattgcattttcaacaccgccactctcatcaacattctgtatcccggcatccttcttccgtatggaacctgagcccagcatccggcagacgggagaggatgcgctggtagcccgcctcctgcccctgatgccttccaatccgtccctggagacggggccgggagacgattgcgccataatccgggggtcaggaaaccgccagctgctcctgaaaacggactgcgtggtggaaggcatgcatttcctgcccggaacggacccggaactgatcgggaggaaggcgctggcacgggccgtttcagacataggggccatgggcggcacgccccttcacgcactggtgaccctgttcgtgcacgcagaccgccccatctcccaggtggaaggaatttaccgcggcatggggcggctggcacggcagttcggtatcagcatcgccgggggggaaagctccggcctgcccgcggacgggctcatcatcaacgtggcgctgaccggagaagtggaggaaggcaaagccgtactgcgcagcacggcgcgggcgggggatctgattgccgtaacgggaacgctcggcggcagcttccccaccggccaccatctttccttcatgccgcgtgtcagggaaggaggcatccttgccgcctccggcgtagccacctccatgatggatctttccgacgggctgggaaccgacctcccccggctggcggccgcctccgggcttaggttccgtattcatgaagagcttcttcccgtgcgcccggggttcactgcggcccaggctgtaggggatggggaggattacgaattgctggtgaccttccgtcccggcgaccgagaacgggcggcacgactggccgcggagcattttccggaaacgcctctcaccgtcatcggggaaatgactgcggaaacagcctccgcccttcccccaggttacaggcacttcagctagcccgttaagaaccgggggcagagccacgcaaaacgcctgcgaaattattccgccgccttttcctcctctttctcccgctgcatataaggcaggagctgttcatacgcgtctttgcccagataacgcttgatggaacgctccggcgttttgaaaatgtccaccaggatcaggcagtccaatacgtcgccaaaatgcttatccacgctgaaggaaagaattttgccgttcaatttcagatattggcggagcaatacaggaatacccttgccatcctcttctatatcagcgaccaattgggacagcccctgggcatctgccagccccagagggaggatgcatgattccgacctcttcaggtccgctttacggggcggattgtaggccctcacctcattcaccagcacgggctccatttcatgcgccttcagataggaaacgatgagggcgcgggaaaggttggtgtaatcccgggaaatgctgactgtgccgaacaggtagcggtaatggtggttgcgggccatgaactggccgatgccctcccaaatgaaaccgagagccagcggcctcttctggtattccggaacaatgaaggcgcgccccatttccagagagcggtccagcacccgcaaagcggcaggggaaaaggaaaagtattccccgttgtacagccctttcacaccgtagcgggcaaggattttgtccgtttcccccatgcggtaggcacccacaattttctggtgcgttctgtcccacaggaacaggtgcttgtaatggttgtcgtatgtatccaggtcgcaggcgttgccggaaccttcccccacctggcggaaagtatattcccgcaaacgccctatttcaataaggatattggggatttgcagggcatccgccacgtacacgtcccaatctccattttcctgacgggcatgcagacactccgggggcagcgcgtcgatttccgcctgcatatcctgcacggaaacgggggaggtcagcgcggccatcttcgccttccggtcctttttgtgcacatgggggcggcggcttttttcataacttttgcccagcaaataggtgcgcaggcgcagatgggagacgatggcttcatcggaatcatattgtccaagctggctgaacggaatgggcttgcctaccacaatgcggtgtgtccggcggccgtcccgacccacttcacggggaaggaacgccacgcgcgccttgcggttgatcagggaaatgccctggaacaacaggctgttgcgccccgggaaatatacgggcaccaccgtcgctttcgtcatgcggataatggcggcgatattcgcgttccaggggtcgtccgtcacccttttgtgggccagggaaaaactggagaccgtgccggcggggaaaatgcccagaaccccgccctgacgcagccaggaaatcatcttgcgcatgccggaaaggtttttgcgccgggcgttctcatcctcatacacgtccaccttgatgagccagggatccagctccccgcacagggaaagttgctcgttgaccaggatgcggacatcctcccttacgcgggtaagcagctccccgaacataatgccgtccgacaagccgtgcggatgattggcaacgacgacgacaggccctttcttaggaatattttccagatcccccgggcgcagctgaagcttcagattcaaatgcctggaggcaagctgaaagaaattttcctgagaaccggattccttgtcgcgcacgatcttgtcgtacgccttgttcaggcgttccaggcccagcagcttttcggcggacgcggccaccagagcaggcagacgcgtattctcgtccaaaatgtctctgatgtccaccatcttcgggtgtttgagctgggccatgccccgctgtataacggatttacgggaaaaagtgaaactctttttgcaacgcccttcggaacgcagtcttgatttccacagggctcaaagctacaattcaaacggctttagcccccatttccaactcagaagacactcatgcatccagccatcgccattgacggccccgccgcctccggaaaatccaccgtcgccaagctcatcgcggaccgcctcggctatacgttcatcaacaccggggccatgtaccgggccgttacctggtacatgctggaacagggcatcaaccctgcagacacgacggccgtgctggaatccctgccgtccgtgcccctctccttcggcaaggacggcagccgatccgtagttctgtgcggacagcatgtgctgggcgaagaactcacgagccggcaggtcaacgaccacgtttccaccattgcggccatcccggaagtacgcgccctgctggtggaacggcagcgggaatataaccgccgggaacccgtcgtgatggaaggcagggacataggcaccgtggtttttccggatacgccgttcaagtacttcgtcaccgcctccgaggaagtgagggccgcgcgccgcgccgcggaaggactaacggactccatcgcggaacgggaccgcaaggattcctcccgcgccaccgccccgctggcgcaggcgcctgacgctcttctggtggatacgtcagacatgacgattgaccaggtcgtccgtttcatcaccgacaacatccaacaaaaactctcctccagatgaactctttctactgggttttctacacgctcttcaaaagcatttccaaagccttcttctcctggaaagtcgtcaaccgggaaaaactcatcgaagacggccccgtgctcatcgtcagcaatcaccagagctttctggatccgcccatgctgggcatttcctatgaggacggcatctattttttcgcacgcaagacgctgttccagggcattttcaaatgggccctgcccctctgccaggctatccccattgaccaggaaaacccggatgccgccagcctcaagcacgtgatacgcctgctgaaatccggcaagcgcgtactcgtgtttccggaaggctcccgcacgccggatggtgaaatccatgacggcatgggcgggatcggcctcatcctgagcaaaacgaaagttcccgtgcagcccctgcgcatcagcggtgcgtatgaagcctttcccatcggcgcccggtttcccaggctccgccccgtcacggtcacggtgggagaccccatccccttcacgccggcggaactcaacgccaaaggaaaagatgcataccagcacctgacggacaaaatcatggacgccatccgctccctccctgcggaataacccctttcccggccccatgatctccaggctgaaattaatggacttccgttgctacggaagcttctcctggcagattccgcagcagggggccatcatcctgggaaacaacgcccggggaaaaaccagcctgctggaggccgtttgcttcctgctgcgcctgcaatccccgcgcacggcccggaccgggccgctggtctcccacggaaaacaatcctttggcatccgcggagaacttccggggcaaatccggcgcatcctgtgggcgccggacgctccggacctccgcgtcaacggagagcctcgtaaagaccagcgcagctacctggcggacagctatcccgtggtatggatggggaatgacgacctttccctggtgcatgccggcgcggacgcccgccggaaatacatggactttctgggcagccagtggcatccaggctacagactggccctgttcagctaccgccgggcgctgaaaacgcgcaattacctgctcaagcacaggcaccgggacaaactccagctggacgcctacacgcgacagctggccctgcacggcacggaactgagaaacctgcgcgccaatctgctggcgcttctggcgccccatatcgccctggcctaccgcaatatcggcggaaggcaggaacaggtctccatcgcttaccgtgcctcggaggaaggagacctgtatgaacggctgtgcgcctccatggactgggacatccggtacgggcaaacccagaacggcccccaccgggatgacctggacatcacgctgaacggcagaaacgccgctcaattcgcctccgaagggcagcagcgcaccaccgccatctccatgaagctggcgcagtcctccctcctgacggaagaaacgggacatacgcccatccacctgattgacgatgtcttcggggagctggagccctcgcgccggatagcctttctgcagtcgcttccagcggacgcgcagagcctcatcaccaccacccatctggactggctgcacaatgctccgtgccccctgccagccttccggctggaggatggcgcccttgcccccctctgaaaaagcgcggacagaaacaacggacaggcgtccgcctgcggcatttccggggcgctattccttcccccatacgttcaggatttccacaatatacatcttatggaaatccccggcggcataccactccggcacaatagatttatccagaaaagcttccgggttaagaggctccgcgtacagcttgcggcactccagcaccaggcgcgcttccgtaaaacttacattgccgttctccgtcacgtatggcgtcaggccggaagcggccaccttgtccgtatcccgtccgctcgttgttccgcacacggtcagagccttatggtactcatggctgaaaaaggaaagcgtcagctcgtccccggactcaataaaacggaaggtatggcgctgggggcggataactacaaacgccacaggcttcttccacatgaaccccaaaccgccccaactggccgtcatcatgttgaaatgctccggagaacccgccgtcaccagcatccaatcgttcccgatcaattgtacggcattatcctgaatctcctttggttcaatctttttcatcatcgtctccaacgttcgttcgcaaactatcctacacccctcctcccatatgtcaaagctgtggagaggccgggatgacgcgggaaaacaaattccgtccccgccgggaagctccctccgtttggagttgcatttccggaacggcggccctagcatttccgggatgaaccacaccgcgctggaagacaagctgggttaccgtttcaacaatccggatctgctcgttcaggcccttacccaccccagcacggacagcaagccggaaacgcgccgggcgtatgaacggctggaattcctgggagacgccatcctgcagctggccgtcacacagtacctttaccaccacatgccccaatccccggaaggggaactgacccagctgcgcgcccggatcgtcagccgcgccaatctgggcaaatacggctttatcctggggctggataaacacattgccctgggaaaaggggaagaacgggccggcggacggggcaaaaattccatcatcgccaacacatttgaatccgtcttcggagccatgtccctggattccgactatgaaacggccaaggctgtagccctgcgcgtcctccatgaagctctggattccgcggctagccatcccaaggaaatcaaccccaagggggaactccaggctatccttcaggacatcctgcccgaaactccttcctatgaaacggaagaaaaagggccgagagacgccgaaaaccgttttgaatcccgcgttttctggcatggtcacgccattggagccggctccggggccagcaagagaaaggcggaagtggccgccgccgcagacgccctggacgccagggcatggctccgcatgaccttgtaaccgccaaagggggacgggtggctattttgtcacccttaagccttggacactcctgtggctggtttgatagacagaagccgtctccgtgaggaagaaccttccccggaagaccttctcacagacaaaccaaccatagaaaacaaatgaagacctatactctccccgtcatcggcctcatgactctcggagcctccgcctttgccgctgccgcgccctctaccggaaactccctgccggcccgcgacaacttttccgcctgcaaatggctcggcgaccgtttcaagtggttcaactcggaacgggaccataagaatccttacatccaggaattcaacgtttccctccgcatgcagtacggcctggactggattgatccgaacggcgaaggccgcgtcatgggtgaaaaggaaggcaacggccgccgcttcaacgatgaatggcgccgcttccgtgccgggttcaacatgaagtttctgaacaatttcaagctcaacaacgtctggaacatcggcggcatggacggcctggaaagctacaatgcgaaaaccaacacatgggacacctccgacctgacctactccctttacgaactgaatctggaatacaagggaggccccgtcacctatgccatcggcaaaataaagccgcgcatcaccggggaataccgaacgtcctcctccgccattctgactatcgaacgctccatgctggtcaaccagctccgcccggaaaccaattacggattccaggtgaacaattccgacaaaaaggacaagctcggctgggccgcaggcgtctggctgaacggcaacggaggcaccggaaccggcacgttcaacaaccgcattgaacccgctttcaactcccgggacaactgcttcatcaccggcacgctgagctatgacacgtccaacgacgttttcctgaagaaaagccgtctgtggctggattacgcccacaatttcaccaagtggggggacgacacccaaaacaaggcgtatgaaaaactgaccggttacggctttaaatccaaataccagggtaccggagccagggacgtggtagccctgacctgggaaggttccgagggggatttctccctgatgaccgaagtcatggccggcttcaacgtcatcggcatgaaagcgggggctgaaaacgtcttcggcgtgaccgtcatgccgtcctacaagttcaccccccactgggaaggagtggtccgctaccagatggcggcgggcagcaacgccgtaaaatgggaaaaacgctatacgcagaactccacttattccggaacttccgactgcatgcaggccctgtacctgggcgtcaactactacattttcgaatgcagcccgaacatggccaagatcatggcgggcatcgaatacgcccattccaacggcacggacgccagccggcagaaaggctttaccggatggagctacaacatcgccttccgcaccaacttctaattgccggacggtatcatcccgtcaacagctggccgcttctgttcaggggcggccattgttaatggtgtgacgccccgcatggcagttcccccaaaaaacggcagccgtcatttccgtaatgccttccatatttaaatacctggtccttagcaaatcggaagaagcatgccccatttccatctgcaatacatgcaaattcttgaaatgcctggcaaaataactggcaaacgtgtgccttaacatatccgcaggccacttcttttccttcccgtcccacccggccaaccgtctcagctccctccacttcgccggccagttgcgcggacatacgcttcccgacacaaatcccatagcaaccgttctttccagcagatttcccaaaaccggctggatcgtcacaatgcgggctcctcccgtcttgctgtggcgcgccctcagggaaaccattccctcccttaaattaatctgtgcccaatccagccttctcacttcttccgggcggatgccggcatacagcatcagcccaaccgcagccaggcacgcccctccgtcatactcttccgccgcagccaacaaccggcgcatttcttccagggacagcacgggaatggaatgctccttcagcctcggcagatccacatacgccaccgggttttccgtgcaccagccgcgtttcacagctgttccgaaaataccgctgagcaccaaccgggccttatgcctctgcctgagggtatcaaatgatttttccaggcaggcgcggcattcccgaggcgtgataaagtgcacgggccgccgggccatttccggacaaaaccttaacaaccgccggctgatataacggaaatcatccctggttcttttcctgcgatcttgccgggcctccatggcctcatccacggctttcctgaacgccacggtttttcctctggcaaccagggcttccactcccagccggatgcattcccttgccctcttccatcggttgccgcgccccttgctggcctgcagcaattcatgcgccagctgggcggcttccaccacatccagccctgtcttcttcaaaatggccagcgccgcatgatccgttgctgaaatttcctctttcatttcatctattttgcaacggtttcggaatccgtagtcaagcaaaaatagtcgtttattaaccaaaaggttcggcaattccatggatgccgtttcaccgcaccgtcatatcagcaattcccttccagatagtttgatgacaaagaggacacaggaattcctatacggattccgaatccgctatcagcaaatgcaggtcttattctttgggcatccgcagtcgcatgacgctgcacggagtctcccatcaaaagaaggcctgccaaaataattcctttggcctgtgtctcaggcaagagaatgaaactggcagggaaaacggctagttcaacgcccatatgaacctcatgattattgaaatgacggaaacgcgctgcctcattctggaagaactgctcaacaccattcaaagctgcgatctttaatccggagttcccggcttgaacggttcgcaaccaaatcttcccctctacatcaaccctgttgctgaatagagcttattccatgaaaaagtcggaaaactttatggacgtctttcataatattgtccagatcatcgggaaatccctagaaggagggtattccctgacgctggcggaagaaatcatcgtgttcatcatggctgtctcgctggccgccttgattttatgctttgtggccttttgcaggaagacactaaagccgaatgctgaaaatataggcctcctgctaatcgcccctttgatgggaacaggtctgatcgtgaccgtttacgcctacgtgacggaaggtttttttgcaagcatgactctgttatggatcttcagcgccattactatcgggataggaaagggttcgggactcctcccagaagaggacactttcggcagcgtcattcaagaaacgagggaagaatggaaggcggaagataaatatgcggatgcgttcgaaggtaaaagcattgtattcaaagacggcaccagaggcactatccgaggtaacgacatggaatcttccatggaaaagtggggatttcgccttggagggctgggagtcggcctcgccataggggccgccatcatcggccctattgtctggatagtatgcattaagcaggcattccatgccggatgtattgcttttaaccaaaaaacggaataattcctctattttatgctgagcgtctctacaccgccggaaacctgtcctgaggaaaacaacggacattcccacaacacgcagacctatccacatggagaaagctatgcaggagaatgcaagaacggcctgcgccacgggaaagggatctattattttagcgatggttcctgggtacaagggacatgggaaaacgacaagctttccggaaatgccaccttttaccatgctcagcaccagcggacggatcagggaactttttgcggaacagccagaaaaggccgtggaatgatgacatggaaagacggcaatatctacaaaggtacgtggaacgatacggaagaagggttgcagggcaaaggaatcatgctctcccctgaggggaaaaaagaagcaggaaaatggataaacggcttatggaaaagacgcttttcttataaaaattcattttacgacatcatctatcccatccaaaaacaccctgtttcttccctgatttcctttttccttatcattaccctgcttatccctggaataactattgacgcaaagtcggaattttcagatccgtatattatttttctacttacaggcgatctattcccgtcagtaaaaaatgccgcttacgtcaatatggcctgcatcatatcaggttccgcccttcttatgctctccgtgtgtagccctgtttttaaacgaattactggaattcaccataatcctttaacagccatatttttgtcatccattttcattggcggatccatgggatttctgcgtacctcctaccaaggagagttcttttacaccatgatatccattttcagtctatattttctcatttttatggcgaaatgttattatcagtccgtaaggttcagatttgctctcattgcaggtattctgttctcatggctgtccatgttacttttcaggaattcctattatctttttgaaaatatgtgctggccttatgctcttccgctgctatcggtgctcgcctgttttgcatggggccgcattaaatacgagcaaaacggattttttcccgctcataaatcatttacgctggccatagccggcatttcaataaattacattattctgcatccctggttggacaccaataaaatcctgtctcattggaatagcattttttccagcatcaactaatgaataaactcatgaaacctattccccccattttttctttcctcatcattgccgccgtgtgctggagccggtcatttgccggagaagttcaatctcctccgtctctggagggggcatcgctggaaatttccgcaagaaaggaagaatataaaaatttgcatcatgatgtttttctgaatttaaaggacggcatttcctgggaggggagtgaagatagaatcgttacatacgaacccaaggggaaaaacgctcatatcattgtcgttcattgtgataagcggaaagaggattattcttccggggaaatatacgaaaagaacccatccctgttcagacgctattatttatcaggggagaaatcctatgaaaaggcaaagggagaaaacccgaagccggccaccatcacgttcacagacaagggaggctattgctattacaaagggattcttcaaggctatcttacttgcgctcaaaaacaggaagcggaagacctcaccgggattccggtaactattttgttggatgaagaaaaaactcctgacccggaactggaaatattgctcgaccagattgacggaggagaactcacggggcgccagagcaattacgtacgtcaggagctgtccgcgtattgggaaaaacgacttcataaagcacattcggccctcatgaagcattactcccatgttccggccatcgcggaaaaattgaaggcggcgcagaagggatgggaaagttatcaggactccctggcagaggcatatgccgcatgcctgatgcaggaagatgaaaaagaacaaaagagccaatggtttcagtttaacatgctccgcctggagtgcgataataccgagtggcattgccgcatcctggaagaactgctggacacgatcaaacagaacggtctttaaccggacgaaaactaccaaccatcaccatattaaatacatatgaatatcgcaaagacattccgcactttttcccggacaggcggagccattaatattattcgagctgccgcattcattcttcttaccgtcccggcttcagcgcaaataccgccggaggcaaagatgctggaactgacttttcaggaacaggaaaggaaaatcaacgacgcggcttttgccaagtacaagccggagctggtcaggctcatgaatgaatgcgttaaaaacgaggattttgaacaggccaagcatatcagggatattctcgaacggaagtccctgcccggcattcaggaagaggaaaaagaggattactcgcatttcatcgggcaatgggaagaaacggcgggaggatacgtttatttaagccgctttgatgggaagcaggcgcaacagaagtccggcaataccggatggctgggcaaaggcggagtggacaaggatttttcatcccctgacatcatcaggctcaatgaaacccggacggtatggttctactggatcaaaacggaccgcgacgaccatattttccaagttaaccacgctaccaaactggtttccctgttaaagcggaagggagcgcgcgaaaaagaagcgaatcgttccacctattcctcatctttccctaaattcgaccttctttctgaaaaaatccatgccgatatggcaaccggcaaaggaaaactggcccggcaatacgctcaagccctgcaaaaaaagagcagggaatggggtgtttccggtcatttggaagcggccatctgggcgcgcaaacgggccgagggattgcaaaaggggaatcataaggagaaacagcaactccaggacatcaccggaacatgggacttcccttcaggcaccgttcaaattaaggatccgaaagaattccgaatggagggggaaagcatgacgttcgagtatctgagatccttaaatgacagtgtccacctgttctatatccaggaaaccaaacagaagaaaatggtaacccggattaacaacctgcttctcattatcccttatgactgccgcgggccattccaggaaggggttatgaaaccctgagcttttccgtaaaagagcctctcttttacgggaagcccatttcagaaaaccgcaacccatgcctttcccgaatcagggttacccaagcccacccccgtctgtcgatgattttaaggccatcagcctgggcagagccgtgtattcacggccttttttcatcaggccgccggcgctcaccagattctggagtttttcgtaaatcctcagcctcaggatttcctctccgcccagggacatgtgctttgccttcatcacgacaacggtacgctgaaaaatgtcattgaattccagcatgcccgcttcatgaagaatgagaataagctcatcagtcaccaaatccggtgtcttgcgcgaggaacgtgatctcctatcctccagcatgatgataggatattatcatgacacacttccaaccgtcaagttgataaaatttgcgtcattttccaccgacatacggctcaaaaagcaccaaaggcgaagggtcggacagcgaatgaggcctgttccggaaaccggaaatgagttgccaccccttctctccggaggacttacttatccggaagaagaaaagattctctgcaagaaaagggaacggggaacacgtattacctgcagcccgggcagcaatacggagctttttacagagatgaaaggaaataaacggttcattttcaggttatgtgcaaccgcagcgctttttctgagcctttttcccctgcaggccggagaatgcacgctgatgagctataacgtaaagaacggcaccggcatggacggcaggagggattatgaccgcacggcccgggtaatcgcggaggaaaaaccggatgtcgtggcccttcaggagctggatcaggggacaatcaggagcggcggcagggataccctgcaggaattggccgcaaggacaacgttgacgggtacctatgccaaggccattgattattcaggcggttcctatggagtaggcattttatccagggaaaagcctttgagcgtcaaacggattcctttgcccggcagggaggaggcccgtgtactgttgatggccgagttcagggattactggttttgcgtcacgcatttatccctgaccagggaagacagcagcgcttccattgatatgattgccgccctggccgcaaaatgcagcaagcccttttttattgcaggggatttcaatttaacgccggattcggaaccgataacccggatgaaaaaatatttcatcctgctgagcgatccggcccaaaaaacgtttcccgccgggcatccgaaggaatgcattgattacatctggatgtacaggggaaaaaagacggaggcgttccatgtgaaggaacgcagggtaattgaagctcccgccgcctccgaccaccgcccggtcaaggtgacggtcagctattgacatgatgcttccggcccgtcaccgggtagcccgcggggcattgacgccgcccaccagcagcacgatttccccccctggggggcgttccgcaaattccgccgccagccgggaggccgaaccgcgatggtaagtttcaaaggtttttgtcagttccctggctacgcagacgggaatatccggatccaacgccgccagagcctgcacggttttgacgatgcgatggggggattcataaaaaatactggtatgggaagcttccactgccgtttggagcacagcgttttttttcccggatttgacgggcagaaagccgccgaagaagaatgcgtccgtaggcagtccggatcccaccaatgccgtcaccacggcggatggcccgggaaggacggtgaagcttactcccttttccttgagggtctgaatgagacgatagcccggatcgctcacgccaggcatgcccgcatcactgatcacggcaaagctttctccgccggccgcgcgcgccgcaatttccccggcacgcggctgctcattgtggtcatgcatgcttaccagcggtttgcggatttcataatgggaaagcagaagaccggaatggcgggtgtcctcacacgcaatgacatccaccttgcgcagcacgtccagagcccgcagggtgatgtccgcccggttgccgatcggcaccggaacaaaataaacgctgtattccactttctccataagcacagattttcctgaaccgggcgggattagccattggtaagggtttccgcaatggaagtagccaccagacgggccgcataggaaagggcattcgtacgggccgactgaatgttgccctggtcaaagaattgacctacttcctccgcagagccggcatacaggatttcctgcgtcctggcgtccaccacacggtatttgacagacaggcgcaacccaagttccgtactcttgtaggtgtcttcccggctggatcgcaactggtcgaaggtgatggagtacacttccccctccacccggatatccgcatccgcaccggagcttaaccggtaggtgccgtcccgctgcagctcatccgccaaggcgccggtcaccagcgtggcggcacggggttccaaagagttgttggtaaagaggcataccttgacggtctgggccagttccagcttgggcggcttggtgccgccaagctggtagccgcaagaaccggccaggaggcaaaaaacgggcaggaagagtttgaaaacgttccggatacggttcatgaggacggagagttcctgttatctgctggtcacgcgcagttctttcaggcgggcctttgccctggcggcggcggcgggattgatgctgcctttggaggctacttcctggtagcagaagacggcggcatccgcatctttcatcttggtcaggtagtattccgccacttccagctgctgggccaccagctcacgcttcatggccgccagatcggcacgggcggctcccgcacgggcgctgttgggataacgctgaaggtagtcttcatacgcttcctgagcgcgggccacattaacgtggttgcggtctccgtccgcagcagcctggcgatacagggtggctatctggagctgggccgtgggggccagcggagagttggggtaattgtccaccaggttctggtatgcctctatggcctccttcatccggccgcgggcggccagataattgcccagcacgttcatggcctgcggggcggtaggggcatacggggcgttgtcacgcacatgcttcagccattccgtgacgttcgtgggatccatcctgacgtcaaacatccacagcacgcggttggtcagcgcgccgctcgcagcgccgaaggccatttccttctgccgggacatggcctgcctgtacagggggctgtccgggtggcggtcaatgagtttctggtactggtcaaacgcttccgcaggttccttgcgggcctcatagagttccgccattctgaaccgggcctggggagcttccctggaaagggggtgtttttccaccacgcgcctgtatttcttgatggccccggagagatcattcttcgcttcctttgccctggcttcctgcatcagggcaatcgcctgctgatccaccatgcggacggttccggggggaggaggcgcttccgaagagcattggcacagggccagcgccccggaaacggcagccatcatgagaaacagttttttcacattcatgattttacagcagaaaaagagggcgcgtcaatccggtgaacgcagattgacgcgcaaaaggagttaatggcctttgccgtacacggcttcggcatcaaaaacgacgcctccgtccgcttcacgcagcgtgacgccccccccctggggctgggctttcagttcatcgccgaacggaacggaacggtaaaagcaggagtggtgcccggtgtggcaggctccggcgccgcactggtccaccagcacaatcagggcatcctggtcacagtcaaccaggatttgctttactttttgcacgtggccgctggtagcgcccttatgccagatttcctgacggctgcgggaatagtagacggcttcccccagttccatggtcatgcgcagggattccgcattcatataggccagcatcagcggttcatgggtaatatgatccatggcgagggccggaatcaggccgttctggtcaaatttgggggcgaattccacgcctttttccacattcaccttgccgcggtcggcaaagacaatccgggatgagatgtcattttgttccataaccggcccccttagtacatgaaatatccgacatataccaatcttttctgttgccctgacgcaacgaaatgttttcataggagcatatggcatttacggcatcccaagcgttcgatctgctgcgcaccgccttctcccgcaaccggcttccccatgccctgctcatcgtgggagacgagcaccagggagcctcccgcctgatcctgcaactgctggagctgataaacggcatccgggcagaccatctggacagtgtgagggacgagtattgccggctggtgcgtcccaagtccaagtcgcgccgcatcctgcgggatgatatccgcgccgtggaaccctttttgcaacagcgcgcggcggaggggaaatggaagatagccgtgttcatggatgcggagcggatgaatgacgaggccgccaacgctttcctgaaaaccctggaggaaccgcccggccagtgtctgctcattttgtccacctcccagccggatcagcttctccagacaattatttcccgctgcgtgcgcgtcaatctgctgcaatccggagaattcaggctcactcctattcaggaggccctgctcccgcactggctggagacctgccgcaatctgaataatgacctggccgctctggccttccgcagcaggttcatggacgtcatggcagaggccaaggccgccatcaccaaaaacctgaatcaggctctgaaagatgaagccagggaagcagcccagggtacggacgcctccgactgggaggcccgcaataaggacgcgaatgccgcccagatagagacggaatatctggaacagcgcaatcaggccctggaactgctcatcagctggttcggccaggcagccctgattgcctccggagccccggaagtcgctccgattcatccggaggtgcgcacactggccgcccagatgcccgtgaacgaattgctgaagcgcatggaggccctcaacaggctccgtgatgatttgaatttcaatattcacgaagccctggccctggatgtccacctgctggcggccgtcggatcctgctgacgaacaaccccgcctgttactgtcgggccgcgcacggcattggaaaaggcgcagaaggtctctattcttccctttccttccggagcaggggcgccatgatttcctcataggcgcggaatttctgctcatacgtcagccgcgccgccgccggactggtggaaggcatttgaatgacggaaagcgtttcccgaaggaacagttcgggaaaataccgtttaaggtatttatgggaagcagtgccgttgcagcagaccacgccgatgcccgggaagcgatccagcagggccgcaatatcattgggccgttcctgggagatgtgctggtccaggctgccgggcctgacgccggaggccaccacgtcccacagccccaccccgccccggttgagcagggacaggcgttccccatatggcagggagggatcgaaccccagaagggaccccatgattttccagaacgcgttgcggggatgggcataatactgggcctgacgcagggattcgtctcccggcagggaaccgagcaccagcacggaacagtccggggtgacggaaggagggaaggagcattttttcacggcgggaaacggtcagggggtctgcatgccggaatgcctgcgcacttccttcatgcccacttcctgccggagcagggaggacagccacgggtggcttcccacggagggggccaggttgaaccgttccggcctggtgatgcgcgtgaaaatgacgcgcttgatccgggatttgggcaccgtcctggctccgtaaccgtccggaatgttggaggaccagaacgttacctggtcccctccatccttcaccaggacggtcagatggccggattcccggcgcccgatgcggtccgtccagaaaattttcatgaagtcgccggggcgggccttcctccagtcctcaaagttgatgccggctcccagcctgtgcaccaggacggccaggccggggccattggcgttcgcccatccccacggcccttccccgtcatgctggccgaagcgggggatgagggccagccacgcgcgttcggaaataacgggccgcggctgtgcagagtcccatatctgcagggatttcaaaaggagcaggtagcaggcagaggaacagaaggagggcgtggcgttacggagaagaaaaacgggacggcgcgtgcgggggtcccagcggcaggctttctccacaagggcctgcatggcttccctgctggtttcgtagccgccgccgttccggaactgggaaagtccggtccgcagggcctggtaccaggaagccgcctccgaaggcacggcactcccccgccccgtggaagaaaggtccgcagccgatgctgcggagcacagcaatccaagacagcaaattaatgtcagggcgttcctcatccttgctccgcagggtatacggacggtggaaaatatcaagggcggattgcgtgcggcactgtacgaaaaggaaagaaggccatagccttttccccggaattcctgttgttttgtctggacttatcgcccggcgtcccgtactgtgcgtcaggtcacgcgccgggtatgcggagcggagaggcaacgcaccttgggcggaccttgtttccggcatttatttttaaccaccacggactacatagaggcatcataccatggcaaaacgcgaagatatccgcaaaatcctcattatcggctcaggccccatcatcatcggccaggcctgcgagttcgactactccggcacccaggcctgcaaggccctccgcgccgaaggttacgacgtcgttctggtgaattccaaccccgccaccatcatgacggactccggcatggcggactacacctacattgagcctctgaccgtggaccgcatcacggccgtgattgagaaggaacgcccggatgccctgctgcccaacctaggcggccagacggccctgaacctggcttccaagctgcatgaggaaggcatcctgaaacagtacggagtggaagtcatcggcgtggatctggaagccatcgcccgcggcgaagaccgcatcatttttaaggaaaccatggacaggatcggcgtgccggtcgccaagtccgaacccgtctactccgtggaggaagctgaaaaggtggccgctgaactgggctatcccgtcgtgctgcgccccgcctacaccatgggcggcacgggcggcggcatcgtttacaacgtggaagaactgcgccaggtagtcccccgcggcctggccgcctccctcatcaaccaggtgctggtggaagaatgtgtgctgggatgggaggaactggaactggaagtcgtccgcgacgccaagggacaaaagattaccgtttgctttattgagaacgtggatcccatgggcgtgcacaccggagacagcttctgcgtggctcccatgctgaccgttccgcaggaagtgcaggataaacttcaggattattcctaccgcattctggacgccatcggcgttacgggaggcacaaacgtgcagttcgcccacaaccgggaggacaaccgcatcatcgttattgaaatcaacccccgtacatcccgttcctccgccctggcttccaaggccaccggcttccctatcgcctccgtctccaccaagctggcctccggcgtcacgatggacgaacttccctactggcgcaaaggctccctggaaaaatacgaaccttacggcgactatgtggtcgtgaagttcgcacgctgggcctttgaaaaattccccaaggcagccgacaagctgggcacccagatgaaagccgtgggagaagtaatgagcatcggacagaatttcaaggaagctttccagaaggccgtgcgctctctggaaatcggacgcgccggcctaggccgcgtgaaaaagctggaagccctctccaccccggagttgcgtgaaaaaatcacgtacggcaacagcgaacgcttcttccagatttacgaactcctgcgccgcggcgtagccgtggaggaaatcgtgaagctgacccgcatcactccgtatttcattgaacagatgaaggaactggcggactttgacttttccctggatgggcaggactgggattccctttccgcggaaaccctgcgccaagccaaagaaatgggtttttccgacaaatacctcgcccagattttcggggtgccggaaaaggccgtccgcgcccgccggcagaaagacggcatcacggccaccttccgcatcgtgcccgtcagcggcgtggaacacgcggaatactactactccacttacagcggcgcggcggacgaagttcccgtgaacgataagaagaaaatcatgattctgggcggcggtcccaaccgcatcggccagggcatcgaattcgactatacctgcgtgcatgccgccttcaccctgcgcgaccacgggtatgaatccatcatggtgaactgcaacccggaaacggtttctacggactttgacacggccaacaagctgtactttgaacccgtgactgtagaagacgtgctggctatttacgagaaggaaaagccggaaggcgtcatcgtccagttcggaggccagaccccgcttaacatcgcccaggccctcaaagacgccggcgtgaaaatcatgggaacccaaccggaaggcatccgtctggcggaagaccgcgaatatttccgtgaacgcatgatcgccctgaatatccgccagccggaaagcggcacggcccgttccctggaggaagctgtggaactggggcgccgcattggctacccggtcatggtgcgcccctccttcgtgctgggcggccgcggcatggaagtcatttacgatgaagaaaatctgaagcgctacggcgtggaggccatccaggtcagcccggaatatcccatgctgatcgatcgttttctggacaacgccattgaggcggaagtggacgctctagccgacggcacggatacttttgtagccacggtcatggaacacattgagctggccggcatccattccggcgactccgcctgcgccatcccccccgtgacaatcgctcccaagcacatccgcaccattgaggaacatgccgccaaaattgcccaggacttccaggtaaagggcattctgaacgtgcagttcgccatctgcaacgatgaggtttacattattgaggccaatccccgtgcctcccgcacggtgccgatcgtctccaaggtaacgggcatctccctggcgcgctacgccacggaaatcatgctgggcaagaaactcaaggagctgggcctgaagtcgcgcgcctgccgtttcatcggtgtgaaggaagctgtcttccccttcaacatgttcccggaagtggatcccgtactggggccggaaatgcgcgccacgggtgaagtcatgggcattgcggacaacttcggcatggcctactacaaggcccaagaagctgcgggctgcattctgcctaccgccggcaaggtgctcgtcacggtttccgaccgggataagaagttcatcgaacccatcgcccgggacctgatttccctgggatttacgattgtctccaccggcggcaccgcagaatacctgcgcggccagggcgtggaaacggaagtggtcaacaagctgcatgaaggccgcccgaacctgggcgacatgatcacgaacaagcagatcgacctgattatcaacactccggtggaccgcaccagtatgattgacgactccttcatccgcatgcagtccatccagaagaaaattccgtacatgactaccatcgcagccgccagagccacggtggagggcatccgctccgcccagcacgtgaaggtatcaccccgttccctccaggaataccattcctgaacgggaaatactccggctatttcaataaaaccccgcatgcctgaaacgcatgcggggttttattcatcgtccggcagacggaggatgtgaatctcaaaaatcgcccgtccgcagattacctccttgccgcactaatgcagatcaagcccttgctatctctgcgcaaatcaatgtggcattatcctggttgggcgcgccgtcgcggttaatgccgtccagcacggaacgcaccagttcctccgcggaaagcatggacaaataccgcatccctgccggccccagggaatccagataaggccccactccgtcactggcgaccaaaacacggtcccccggaaataagggaaagcattcctcccgcaaatccaccaaaggaacttccttccccatcagggcagaagtcagggaatggcgggcaggatggctcaaagcctcctcctggctgatgatcccttcatccgccatgcgccccaattccgcggaatattggtgcagctcattaagcagaaacattttttcttcccggataagcagcagaagggagtcccccacgctgacccacctcagcccatccgcccctatccaggccgctaccagcgtcgtccccatctcgtcatcctcccctcttttcttccgggcggaccatacctgttcatttgcagcggtcactgcagctttcattctctctccgggcaaaccggatttccgctcaaaagcccgcgaacagccttccaccgccgcgcggctggccaattctccgccggtatacccacccatgccgtccgccagcaccagtaccaatgcgtcctctccagccagaatggagaaagaatcctgttggttactgcgggcgcccataatctggtccccatgcaatccggaaaccagaaaaggctcttgggaaaaagtctgatgcatcatggcagtaaataatcgtaacatggatggcctgccttaataaagcaagaatagcgagagaaaatagccatgcctgaagccgcggaatgattatttccagaggaatggaaacgtcagcctgcatggctggaaaaacgcgaaggggacgccccggcagaaagaacccatgcaaaaccggaatgataagcggaaaaacagccattgaatgccccaacccgcaagcgctcccagcgctctccggagtgttgcgccagggaacactttccgcccaggaagaagaaaggaaagtttttactggcggcaggaaaaataattctctaccatattttctgattttttattccatgagccttcattccgccccctccatcgtttgggaactttccggagagccctgtgaaacgcgggatcaagccctgtccggcattaaaaataacacggaagctttcattatctgcagccgtggtgacgaattcctccaggccacctgcaatagtccggaaaattaccattgcgaaatttcgtttgccggcggaaaggacagggagctttacatgacgcccaaagacctggactactcccggctccatgaccttttttcacgctatgcggcaggggaggatctttcccatctcaaaaaggagtggactcttgatgcccacaaacccggctatattaccgccatcgttgtcgttttggcaatcattgccgtccttgccgtcatcatcttcagttcctgaaccgaaaagaggcctttccttttccggaggccatgcatgaacgccgcatcctcagcacttccccagatacatcacagtttcattcggaaccgtaacgcgcccctccgtttcaaaccggtcaaacagcttttccagggcgtccagccaggagaaccgctcttctccgccctccgtcaaggcataggaggtggacatcatgcggcggagatactgctcccgcgtgtaggacaaatcatttggaaagcggaatatctggaaacggtggttgaaaaacgctccaatgctgtccgtcaacttcgccagccctccgctgaatccataaaaacacggacagtaaagacggtggatatttccttcctcccgggcaatgggactgtcttccaccctggagttccaaatcagggcaaccttgcctcctccggacagaatacggcggcattccctcttgaacgcggcggcgtcaaaccagtggaatgactgcgccgccgtcaccagatccaccgaagctccgggaagcccggtccgctccgccgttcccgccacggaatgaaaacggggaaaagcggacagccgtttctccgcttccttccgcatgtcatcattgggctccacgccatacacggtccagccgcgctccagcatggcgcgggaaagaatgcccgttccggagcccatatccgccagacggggattctcccggcggctctcccgcgtcagaagcccaacaacggaggcgggataatcgggtctgccctgggcataagcccgggcttttccagtaaatcggtcagtattattcattagttttcagggtatggtttactccttttctcccgctgttccagcctcaatgccgtacccggctcaagaaaagccgccatgctgcgggagcccgggaaaaaacggatttgcccggtgaccgtcatgcagaaaggcatgcgggaaagattgcgttccttgcccattccccggcaacatggacggagcagtccctacagatggctttacaagtccttcatgaacttttagtatccggctcaggcccgcctttcccggattgcgtcctgactacgggaaaaacgaacatctgcgggttccatttttcagactgcgccgcccatgttcggatattacagacttgcctccgccgtcccccagctccgcgtggctgaagtggactacaatgtcgaccaacttacggagggattccggaaagccgcagaacagcaggcggcggccgtcgttttcccggaactgtgcattacgggctattcctgcggagaccttttcttccagccgaacttgaggaaagcagccctgaacggcctgctccgctttacagaagccacggaaggctccggcacgattgccgtggtgggcctgcccttccttcatgaagacgctctgtataatacggcggcggtagtgcagtccggccgcattctggctctggtgccaaaaaccgtgctccccaactaccgggaattctacgaaaagcggcaattcacctccggcagggaattgggtacaggagtgaaggaagtcacaatcaatggggtgcatatcccgttcggggaggaaatcgtttttcatgaagaatcgtctcccttcagttttggcgtggaaatatgcgaagacctgtggagcgtcattcctcccagttccaaactggctcttctgggtgccagagccattctcaacccttccgcaggaacggaactcaccggtaaggccgcatacaggagggaactggtcagacagcagagcggcagatgcctctgcgcctatgtcctttcctccgcaggtgtgcatgaatccaccacagacaccgtattcggcggccattccctcattgcggacaacggcaggccagcagcggagggggaacggttctgcagggaaagcaccctcatctttgcggacgtggattttgaacggctggaggcggcgcgcctctctgaaagctccttcaatgacagcaaattctttttccctgccgggaatgccctgcatctggccctgccggaacaggttcccggagcgcccggcctggaatacgcattcaacccggcacggccctttctgccttctccgtcccgccgccgggaacggtgtgaggaaatcatctccatccaaacggcaggtctggccaaaagaatggaacatacccgcgcgcaacggctcgtcatcggcatctccggcgggctggactccacgctggctctgctcatctgctcccgcgcctgccgtgcgctgaagcgccctgcctcggacattctggccgtgacaatgcccggtttcggcaccacggacagaacccatgacaatgccgtaaccatgtgccgccttctgggcgtggaacttcgtgaaatccccatctcggaatgctgcctccggcacttcgccgacatcgggcacgatcctgccgaacgaaccaccacttatgaaaacgtccaggcccgcgaacgcacgcaaattctgatggatttggccaataaaaccggggggctggtcgtgggaacaggggacttgtcggaaattgccctgggatggagcacctacaatggggaccacatgtccatgtacgcggtcaactgctccattccaaaaacgctgatacgctgcctcattgaacacatcgcggaagaatcatccccggaactggcagccaccctcacggacatcaacaacactcccgtcagcccggaactcctgccgccgtcggacgacggcaccattgaacagaaaacggaagatgtgcttgggccttacgacctgcacgactttttcctcttccacttcattaaatacggtgcggaaccggataaaatcctgcacctggcggaacatgccttccgcggcgaatttcagccggacttcatccgccgctgcctcggcatcttcatccgccgtttcttccgtcagcaattcaagcgcagctgcatgccggacggccccaaggtgggcaccatttccctttccccgcgcggggactggcgcatgccttccgacgcctgcgggaccgtgtgggcaaaagccatcccccactactgagacctcctatccggaaagttgcggagacggcttttcccggaacccggcaaggatgccgaagaccgcatcaatgcccaggggccaacttcagcccgataatgcctatcagcaggaaggatgccgccagcatgcgccagatattggaagaatccccgaaccacagaataccaaccaggaacgtgcccaacgcgccaatgccggtgcataccgcataagcggtgccgatggggatgttccgctgggcaagccacaaaagaaaaccgctcagaaccatgctgaaaacggagcaggcgatacaggcggcgaatttgccgggcccagtgccgggcgtttgagaaagtttgaaacccagaggccatccgatctcgcagagaccggccaacaccagataaatccaggacatatattgaaacggggaatcaccttccgctcaccggccttcccaaatgggaaaagctccaagggcaacggatgccctgcagaatatctgcccggcgtttccgatcaaggcaataattttttatgaacccgtataaaatgggatacacactgtttcaccggcttcggaaaaatggttctttcaaacatgaaatctacacaaaacatatttaccataagtcacatacctgttctttttaattaaaaaacggtcttatttcaagccttctcgaatatccttgagccggaagccaccgccctgtgatattggttccgttatggctattcattattcacttaccgccatcattctgaccggaagcatggcttccacgggaatcgcggctactacatggacaagcgccacccccgatctctcccccacatcccagtacctgtgcaccgaatggtctttctgcctgggagaagcagggtcaaggcttatcacgaccagcacgccgcattcccagccaatggatgcagaagtacgtctaacgtccattgatttcaatttgagagaggccagaaagaacggaacaggcctgctcatcgtgcaacattcaggcggtatccaaaccattatcggcaaatcggacaataccatttctactggaaactatgtttccggaacatggacttttaccaacgggccaattttaaacacaggcactacttattacgccatgtttactgaaacggatctgtccgccatcagcataggagactgctgggacaacgatttcttctccatcaacggttcccggcgtatcgacaattccatggataacgcagccggaacggggccgtctgtcaaccagctcgctttagtcggctccaattggcaaaaggactttattgcccgtaacgataacatggttcccacaggtcttcaaatccatacacaggccgtaccggaaccggcaagcgcattgctgcttacgtttggcatggcgcttctgcccttcagacgccgcaaatctcccacactttaattacaacatccatttcccatgaatctgcacctatcatccctggcagcgttgctcctggcatcataccttccggcgcaggccaccgtaccggcccattccccttccacagcgttcatccggagcggcctcccgatcgttgatctggatcaatggacagaagcccaggtagtagtcgacaaggaaaaaggaaaatacctgggacatccaacgacgctattgctgaaagacggaaaaaccattctgtgcgtttatcctaaagggcacggctccggggaaatcatcctgaagaaatccacggacggaggcaaaacatggagcgaaaggctgccagttccagaatcatggaaaaccagcagggaagtacccacactatatgaaacggaagactcccggggcaagcgccgcattctgcttttcagcggcattcaggggggaaacagaaacacagcccccagaaaccggatggcggtcagtgaaaacaacggaacaacatggtccgagctgacccccatttccaaccaggccggaggcattgttgtcatgagtgacctgattcctctaaaaacgggaaaagggcattatatggcctcctaccatgccaatgcccggggcaaagacggacatggagagtttcacaccattgaacaatatgtcacctttacggaagacggtgggctgacctggacctccccccaggtcattttcccagggacaagggacatgcacctgtgtgagggaggttttgtccgcagcccggacggaaaaacaatcgcgctgctgttacgggaaaacagcaggcaccataactcccagatcatgttttccgaagatgaaggtaaaacatggactccccccaaagaactgccggcagccctgtgcggagaccgccaccagattcttcccctgcctgacggaaggcttctggttcaattcagggatgctcccccgaccaggaagaaagggcaggccgccagcccgacggaaggagactgggtagcatggataggccggtgggaagacctgaaaaacggcacggaaggctcatataaaatccgttttaaggacaaccgcaacggttgggactgcgcctacccggccgccgaactattgccggaccataccctggtatgcactacctacggacactttgacaaaggggaattgccatacatcctctccgtcagattcaaaatcagcgatacggacaagatggtcaaacaatatgcggggaacaatcaccccaagatcaaaaatgacacaggagcgggagaaaccgtttttgaccccaatgatccggactccgttaatcgccttctgaaacgttcctgaacatcatattcctccatgctcccgaaaaacgcggaacggaaaaaacacaaccggcaagaccgcttgccatcagaagtaaccagaaagtatgattcccccatgaatacacaccctggggaaacggcccagtcaagaaccgttgccaaattaaagcaccgcctccggtccgggcaattcacaaacgccatgcccggagaacgggaactaagcaaagcgctcgccgccggcaggggaaccatccggaaagccctcgcgcagctgcaggaagagggcttcatagcggctccggataaaaacagggccaggaaaatcatcaggacttctacaagccctgtgcagcctctgcccctgctggaaaaacgcgtttgcttcctctcctccgttcctatccgggacatcccccaaagcatttgggtggaactttaccaactggaaaaagcgttgcgaatcgaaggtatggcgcttcagctggttgaagccacatgggcagaaaaaaacaatccggacatgcggctggaaaaactggaaacagaacatcccggctcctgctggatactctaccgtaccacggaagaagtacaactgtggtttaagcggaaaagcatcccctgcctggtccggggagtttcctacccttcctccaatctgccgtatctggatacgcattgggaagtgctggccggtcacgcggccggctacctgtaccagaaaggacaccgtcggatcgcgctctgcataccggattccaagctgagaggcaacaggctcatggaacaggggttcctctccttccagggggaacattataccccctatgtcatccgcatgccgtcggatgccattaaggcagcccaggaactcaaccgaattgacctggcggatacgggtatcaccgccttaatttctacccggagcagaatgctgatatccatcatctcctgggcgaccaccatggctaaaagcatcccggaggaaataagcctgctcagcctggttcatgaaccttacctgaaccatgtcactccccccattacctcctaccgctcccctgcagaaaaaacgacgcgcaggcttatccggatgattgaagccctgctggaacatcgccgtatctccaatagcctcatcctcccggagttatgccccggccaatccatcagtacgttgaattcccccccctcctgcctttgaatccatcaagtaatcaggcctgatctgccttcttccataacgctccgctacggaggaaagcattcaatctccccctcccggagacacctccggaagggaaaaacgtattagccagctttcctctacttgagaacaggagcttttttgccgggagccagccctgtgtcctctccgtccgtcaaccattccatggtaatgggaacaaacttcagctttttaatatgctcctggttttcctcataaagcactccaacgatgccgggttccaccatggcaaggctggaataggcaaaaccgccctcgcccagcaatttcttcaccggccaggtcttgccgttgtcatagctcatggccacctgtcccttaatgcgccggcccgcgctgggcccggaaaacagaatgcggcttttgccgccgtagacaggctggtcgctcaaggaatacgtcatcagggaattctgggtactgtcgcaaaacagctccggagcgtcctccacctgtccccaggtctccccgccatcctgggaccacgcaatacggcggcaattgcctgcgccccaatggcgcgcaaccatcaccacgccgccgttatccgtttccgcaatggacgtctcgttcaccatgcccttcatattggcagtcggctggcccagcttccagctcttgccgccgtcatcgctgtaaatgcaggaaatcacccatttgccgaacggcccttcattcatcggaatcaccaggcggcccttgtgggcgccgctcttcagctgggttcccgcattcgggccggacgccataatatccactcctgaaggacgcttggtcgtcttcgtgatctcctgcggcttcgtccaggaagaacctccgttcctgctctgaatcataaaattgcggatgcacttttcatcatcccatccgtccgggatattgggctgccgctccttgaccccggcagggtaacgctggaatacgacagtcacggtcctggttttggcgtcataaacggggcacggattattaaacgtggcgccatgggccttggcaatcgcccggggacgggatcaggtcttcccgccattcttgctgacgctcatgataatatcgttctccccctggtcggtatttttgtaccgtccttcggcgaatgccaggagctggcccttgccgatactgagcagggcgggaatacggatggacgcatagggattaccctccccggcgttgaatacggtcacagccctgtccgtagggaaatcggttttctcttcctgcccgaacgccggcaatgccacggcgcatacggcactcatcaaacatttgaatacggaattcatcatcctcttcaccttattccattttcccctgccgcacaacaaccatgtcatgcatgtgcgccaagaccagaggaaaaggagcataaagaggaacgcgcggcaggaacgcgataccgccgccgggaaacccggaaggcttcggcccaaaattcaagccagcaagaaacgtgcccatccgaatacggagccccggaaaagcgcccgccggaaccggggaaaatatccggaaacgcgaaatcggctgaaaaaatccctgccgcaccgccaaagccattccacacatcaaccgcccggcctctctccggacaaaccgcttgcctatttattcatcaagagaaaaatggtgaaagaagaagaaaacggaacctgtatcttgtaacatcgcagaatcacctgcttcccgtactgtcatgaaccgaatccttccattactatcccttcccctgctgtcgctcgcagcggtatttgccgccaacacgccggaacacatcggcaacgacctcaaactgttcaaagactcctcctgcacctccctgaagccggatgtgaaagacacctccgccttccagtctgacgcgatgaaagaactcgcggccaaaatcctggcaggccattacaagccggactacctgtatgccgaataccgggccctcccctcaccaagccagacggggaaaaatctcagaatcggagatggattcagcaaatacgacaacatgacgggcgtctatctggaaaaggggcggcatgtcgtcctggtcggcaagacggaggggcaggaaatcagcctcctgctgccaaacctgatgcgcaagccggccgaaggagtgcagcccacaaaagatcccaacggctggggattgcacaaaaagcagattccgctcaaggaaggaatcaacatcattgacgtggaaacgcccgccaacgcctatatcagctatttcaccgaagacgccggcaaggcgccgaaaatccccgtccatttcgtaaccggcaaagccaacggttactttgacaccacccggggcgacaccaacaaggactgggttcgcctgcttgaccaggccgtctctccgatcatggatgcccggggaaaatacatccaggttgcctaccccgtagaattcctgaaaaaattcaccaaagaccgcggaaccgaacttatcaacgcctacgacaagctcatcggcatccaataccagctgatgggcctggataaatacggcaaaatcccggaaaaccgcgtcctggcccgcgtgaacttcaactactacatgttccgcgacggagacggagtcgcctacctcggaaacgacgggacaatgcgcatggtaaccgaccctgaaaacgttctcaaaggcgatgcctgctggggattctcccacgaagtaggacacgtcatgcaaatgcgcccgatgacctggggcggcatgacagaagtcagcaacaacatcttttccctgcaggccgcagccaaaacaggcaatgaaagccgcctgaagcaccagggcagctacaacaaagcgcgcaaggaaatcatcgaagggaaaatcgcctacctgcaatctaaggatgtcttcaacaagctggttcccctgtggcagctccatctttactttaccaaaaacggataccccgacttctatcctgacgtcatggaatacctgcgcaacaacgcgggaaactacggaggaaacgacaccgtcaaataccagttcgaattcgtcaaggcatgctgtgacgtcacaaaaaccgacctgacggacttctttgagaaatggggattcttcaaacccggaacattccacatcggcgactatgcccagtacgactttaacgtcacccccgaaatggcggcggaaacaaaaaaatggattgccggcaaaggctacccgaaacctgaaaccgacatcaccgaactaagcgagtaatgtgattcggcaatcccgacgattccctttaatcatcaaatatgctgcaaacggataagaaaaacaggggctcaagttcaattcttttgaaagtatttttgatgatggaagattattaagaagttaaactccctcaccaaagggtggaatcattgttgattccaccctttttcatttctacatccatctttctatccccagtcatactgggtacgacaaatggcatggtaccccaagattaaatgtattcccccatttgatagcctacccaggaattgatacaattggcatacgtctcctattttggtcaagcatccaaacaggaggtaaaacaagatgctttttgatgaaccgtttttagctggtttgtcatccgtatagcgatgggaggatagcgtatttccctgatggtcgcaaatgaaaaaggcatttcccttgagtatggaaacaacctcagaagagaatccctgcaattttccttgttgagtgaagagagtttgtccttcaggggatattacgcagacatgtgttccttgttggtatgcagttccgatcatgaacccatcatgtcgtgaaacacgggatccgtaagcgataaaacacagtgacagtcaattattttgccgtaatgagcagttatttccctgacttgataggaggaatatcctgagagaaaaaagcgacatccctattcagtttttccgcgatttcgcagatggtataaaatgtgatgttgcgctctccccgttcaatgctgccgtagtagcttctatccaaattggcaacatgcgcaaatccttcctgagagaatccctgggcttttctctcgtttctgatccttgctcctaattccttgagtacattttgcttggacatctattcattatcgcagaaatgagaaatttatgtccacggcctaaaatacctctttacagttgtggagatacgcgatattcaaacgttatcacctaccaaccaagaggacggacaaccaaaattgattatgaagttacatctgcctacagtactgctggcggccgtgcttgcctgcatttcgcaaccgctcatcgctacagaaacaatcaacctcaatacccataactgggatcaatatatcggagatgatgggaatccggaatatcctcgatttgataacgttaacctgagccttaacggtaactggtcagtcaattttgataaattctataaccttagttggggcgcatcagataatggttcctatactttgacaggacaagggaccatggatttcaaggacgaggtgttcaccatatctggtggaagctcaaaatccctggctacaggtaatgccaaatatacgattggttccggcattgttctcaaaaatgcaacgctggaagcgtggggaggagcacaagtaatattcaatggttctctctctactgaaaccaatcgagaaactccctgttctttctcggtttattcatttgacgaacatcactctgtcctcgacttgagaggagctacaatcaaggatagtgatttcgttaaactggaatttgaccagggaaccattatcagggatcaatatactgtatctgcaacacacggtctcgaaatttggtattcttcaaattctacatttacaggaaaatccattctgcaaggaaacctgacgttggcaaacgacgggaaagtaactgtttggggatataatgatgcattgtatcccaatatgtccattacgggtactttgtccattaccgggaataccaaaatagagtttttcaatgatagtccggcaaatggagtttacttaaatcctgaatccgggactgtcgtattttactgtaaaaatattacgggagacaccgggcttttgagcgccattgaaagcacatggacatatgatgacgaaacaatatcccggaatatcaccgacaaaaaattcgtatccatcacccaaacggatggacgttatgctctgacactggttgacaacggttataatcccggtcaaccggaacaaccggaaaccgttattacagacggcaaagctcccgatactctttccaaggatgttgtcgtctctttgagtaatgggggaagcgttgatgcaacggaaaccatcagaggactcaacaattcctgcattagtggaacgggagggaatttggttactacggatacacaaacattctccatgaatggttccgatacactcggattcagtattgtagggacaaacggaaatgcaggcgcggatatccaagtaggccagacgggaggaaacattacggatgccgccattgttttaactggcgacaaatatgaatccagacaggtcaatgttcagagcggccttttggaaattggtcaaaacaccattcttggaacagatgattccatactgacgattggatcttcgaatgcttccgatggtacagttacagcatccgtcaataacagggggacaatcaacaatgacgttaccatcaattccggtgcatcgctggacaacaggaataacattaatggagatgttcttgtcaatgcatcatccattttgagcaacaatggaacggtgaagggggatgtaacggtatcggaaaacgcttctgttaatggcagcggtacctttggttcaaccattctccaatcaaatgctcttctctatgtcggcaacagtccgggattccaacgacatggggatttgatgctaaatgacggctcaaggctcggtttttatctggacggcattaccgctgcgacattggagaatcacggttcaggtacatattccaatatttccgtgaccaacacattgaatttgaatggaacagtgaatgccgaagtagaagtaggcttaggtattttagccgcagggatggaagcgtttactctggatcttatcaaaacggaaggtacggtttccggtaatggtgattttgtcctttccctgaatgatgaaaaccatttcctgaaggaaggcagtcttctatgggattctactacaggcatactcagtttcacaggacaggtggacaaagccgtagcggccgctctggtcggcaaggacggctccaatatcgccaattccctgtggtcaagtaccagcgtcgtcaaaagcttcggtcaaacggttgtttctcaattcaaggttgcccaaccgggagattccaatgtatgggtaagcggtctgggtgatttcgttaccatgaactccacttcccatgcggacgggttccagtacaacggaggtggatatgcggcagggattgactacgcctggacgaagaaattccgtgctggtattgcctttggtcaaacattcggaaccttcaaatccgatgacaaccaggcatccatcaagcaggatagcatcatgaccggtctttatgccaattaccttgaaacgttgtgcgacaagcagagcgttggattgagcggatacttctcctatggatcggtggaaaacagggccgatactctcattggtaattcctcataccttcccggtcatgcaaaatggaatgacgacgtgttctcctttggtcttaaagcagactggaacatcaaagtcaccgacaaggcaacgctgacaccgttcattggaattgattatgtccatggagcacaggaaagcttcacggaaacatacgacaatggaagccgccagtatagggacggcaacatgcaggtatggagtgttccggtaggcattacggtcaaaaaggaagtatcggtaggaggcggacagcttcttctcccagaactgacgctcgcctatgtcggagatatctccagaacgaatccttcggtcaaatccaccatctacggaatcgacaacaaacacgaaggaagcaatccgggaagaagcgctttcatgatgaatgccgggaccaactgggttattaaccagaactggagcgttggagcattctacactctggaagccagaagcagccaggtgaaccaatccgcctcactttcggcaaggtacagcttctaattagacaaataacagtcacccaaggatggaatcagcaatggttccatcctttttcatttttacgccttacgctattcctttccatacagggcacggcaaatggcacggtaccccacccaatcaaacacactcccccaattagcaacctatccccatttggtctcaacatatacagaggaacttcagcatgaagggggtactttctcaaatgcttcaaaattgttttcccgaaaaatggaaaactttttctccattaggaaatgtatcaattggaaaaagaggaaagtcaatttaaccatttgtaaggcaaaattattttttgcggtaatttttcagatttgcgtaggttaatacctgttcttcctccgaaatccttacaaatgatcctggaaacattcagaataaattaccctccaccgacaaggaatacagcgtacgattgaccggaaacacggcacaattcttccatgaatattttgtacgaagcccttttcaataaaatatttccttcaggtcatccaacccagactcatcccttggaatcaaaggaatacggggtaattaattctaaattgatttctacgggaattattcaggaaagaaggtaattggtaaggggagacgttagaaaatccgtacaatcaattctggggatattcagaataaaataacctgcgtatagatgattccgcgtatactgtaatctgcatttcctaaaacatgtgtttccaaaatgatcatgtactatggagtaatggagagtaaaaaaggattatgaaaacgggcttaaaatttacaaatatattgcaatgagcaagttatgaaaaatatggtctcatacaatgtatattaaaaataaagagagatttttcaaatgtataccgctgtataccatgtattgtttccagagaaattttcaaaattcataagcataaggaaacgaataaattacgataaaacaacctcgatcgatgtatgaatataataaatggagggatttccaaatgaatgattatgtatgaccaaatccaggatttccaagggcaatcagttttgtacgaaggcatttttaattaaaataatcggaagtgattaatcttgaaattattcctatgaaaattgttcaggatatagaggaatgactacagagagaacagaatgaattttaggagaacttagagcaaaacagtcaactatggacaatgattcaaaagaagagaactctgattggaacggattttggagctacagtcccagtcctgatgatcctcatgagtttggagaatgcatgaaggattagcatgactataaatggaagaataagaatgaattgtatgaacgaaaaaataaaaagatgggttgaacgggaataacggatctttactgagaagcgtaatcgaagcactgtactaaaattttctgatcaccgtttggcactcttgattttaaaaaatatcctgatagactgtcctcgtaaattacatggacatcacagaatatctattcagagacaaaaaagaaatacttaattattttcggaggaaatctgaaattaagtacaatgaaattcagaattctcatataatatctgatcagaaaaagaatgcatcaattatcaatcgtgatattgcatgcatttcctcaaatctaaaatctgctatcattaatgcatcaagcaaatggtcaaaaaataatttgctcaataatatactaatgataacctattgttcctatgttgttatgatagaatatagaaataaggtttggccatacgaatacatgactttctctagacgtataggagaattatgggatccattctgccggatatgttttgaaaatacggtgagagaaaatttacaaatggtatctccaaaaaaatttgaagaagtagcgatggatcttaaacaggagatgaatgattacctaaatacaatggccataaataatgaagaaaaatataaattattagatttatatgaaaaggtatggagtttgcttacatctggagaaataaaattggaattggatttgcattttaagaaagatgatatttattatcatgttgattttaaaagtggatttcagtccaatgaaaaggggaatactaatagattattactagtggcaaatatatataaaaatatattaaaaactaaaaataaatgtcttctttttgtaagatcaaatgaatgcgataacaatcattaccttaaaacgctgattaattcaaacttatgggacgtctattgcggtaacgatacgtacgagaaaatatacgaatttacaggatttaatttaaaggattggatatcacaatacatccattgggatgaggactttactgcggaaacttataaatatctcattgataacaatttaacaaaatatttaacatggtagatgatgctaagcgcaaaaaaaatagatatcaagcattttatactgaatgctcgattataactcaatacatgattgatctattgcaatgtgagagtaatagctctattttagaaccttgcgctggggaaggagcttttttaagagctatgaaaaagttatcttttagtccaaaaatacatgcgcttgaattaaattatgaaagtgctttattcttaaagaatttttttcttaacgagcaaaatataataatagaaaatactgattttctttttagagaaaatttaccatattttgatagaattattgccaatccaccatatggagcgtatctggatatagaaaagcgtaaaatattaaaaaataaatatccaaatgctaatagtaaagaaacatataatttattcctaataaaatcattaggccttttaaggaaagaaggtagattggtttttattattcctgatacatttatgaatactcgtatgcatgaaaatttgcgaaaagaattattgcataatcatacaatagaatcgattaccttgttcccatctaattttttcccgggtatcaattttggctatgccggtctttcaataattagtgtagtaaagtccgaaccattagattcttacagttttcctgtttattttgattttaaatcaaaaaatgatcttataaataaaaaatgtaattttaaaacaacatatttattctataaaaatttaaaaaataatccgtatcattccttttatttgcacagggaaccgtgggttgaaaaaaattttattgagcaagtatcctaaacttcacgatttttgcgatgttgtaacgggattttactccgggaatgatcttaaacacttgaaaagagctccaaccgtaacacgagggtcaaaatatgaacttgttaatcctgaacaaatatggatgacaagtagtgaagagctacatcctcctttaagtggtgttaagggtgaaaaaatctggattccaattgtaaagggtggtaacaaacgtttttttaagcccacagaatggtatatggaatggagcgaagattctatacatgaatatagaattgcaaataaaaagaaggcaagatttcaaaattctcaatattactttcgagagggaattgcagtacctatggtttcctcaatattaactgcatctcttttaaatcaaaggctttttgatcaatcaattgttgcgatttttccaaggaaaaaagaatctaattttctcttttttattcttggcctattaaattctaacgtctgcaattctattataagaactcttaattcaagtaccaataattccgctaattatataaaaaatattccacttgttattcctgatgctaaagaacttgatattatagcatgtatcgtaaaaaatctttataatctttcgaaaaaatctaaaatacatgaatctgatatgattgaattgaatagctattatgataggctatattcaaaaaacatctagagtagtaattcccccatttcttccccgtgtccctacaaacaaaaaccgcaatatactcattgcgaatatattgcggtaggaaaatgatggcggacagggagggattcgaagcgccgactcattgagtgtaagtgatttacaactaactcgttaagcagcaatatcttgattcagggtgaaatttgataacctattgatagccaatgattttgattttatgggggaaatatgtaaacagcaggtttcccccattatatcagagcaaatatgtcatttgagtctaacaggtttgcaacaatttggctcatgcctggattgagtggattacgattccagggaatttgtattcttttaggtactcttattagagtaatgctgtttgctatcgaattcaaataattggctaatcgtacggactgcactccatttccattataaaacgaatcattgcaagcgcaaattattttatcgaacccattattcagagcataatgaattcctgcgcaaatgcattttactgtgtcacctgcactattgaagtagagtctacgtgaacaattaatttgtagagcaaaatttacctcatcagtaaagtccccatttgtgctaacggcggtaagggaaacaccaccatgtgaaatgactaaattatggacaattcttattgtagttgtctttcctctattacttggaccattgagcattatcacttccatataataagcttaacacataattctattgaatccaataaatacattctattgtatcgagtaaaatatcagacagccgcccccggagattggaggaaaccggctgatgttgtgtgaattaggaattacaggggattgaccttgtagtaataattttgactatccagaaggacagtcaatttctcaatcagatcggttctgtctgccgagatatacacggcgtcatgaaggctgatgcattttcggttttgtttgcagaactccctgagaatatcttcataatggaacagggtgtggcttgactccagggtttcgatcgcctccatgaaagggatgacttcaacaagatacttttcggaaaggaattccttgagtttgtttttcctataggtcttgactcctttcatattctccctaggtgaaattatcgtgaagatccacttgaggagattttctttgagttcatccctctggtcctgatctacaggaagaagggtgtttgttctgatagcttccagtattcctgtacatttaccacgggaagcaagacactggataacggaattagtcaggtcaacttccaccatgttcaccccatagacattttcaaagacatgcttcctcatgaccgaggacattttagtaaacatgttgaatacccggggatgctcttcatttctgctgtatgtattgcagaaaagcttatcaccgatctccgagtagaaggaagtttctccatttggttttctcaacctctccttttcaagaatcaaattgaacgcgggagaattgatctcagccttaaatatggaactggtgttgttttgcttcaagacataggaaggaacccatatagcctcaatgccaagactggtcagtgcttcttcaaatatgggggtaactttcgccctggatctttggttcagcggattgtccttgatattgcggttaaacagcatcctgtacatgtcttttttgaccttggttacaggaatcgtgaagtagaggtattccttgggaggaaggataggcgtcagttctccatcctcctggacgagaggaagggcgttcaataagttctcagcgtctacttgcttcatgtcctttttgagcaacccgattttctcagccatctgcttggcgttgatgagtttggtgttgttgatgattgttttcgcgacacgggtgttggttacacccaccatttttttattattttgagtatgtattttttgcatactcccttaggttcaggagattctttttattcctaagtgttcttttattatggaattacacattcgcaaaaacgcattacaataaacatataacgaaatttatattgatcgtttctcctattctctgtataggtattctcaggcaaaatgaggaaaaggggacgaccatttattccggcggataagcgggacactcggaaactgactgtggaagaacgggaaaaactccgcaggaaggctgtgcttctttacaaaagggaaaatcctgttccgatcatttcaaggaaactgggcatacgtcccgctactgtctaccgatggatcaataattacctgaacgaaggatcgatcaaatacaaagagaataagaggggtaggcgtcccatagagaacaaatatactcaaaaatcatgggatgaatgggtcaaggaactcagggaatattgggcgactcaggaaaagaagaaaccgggtgtccctgaaaacatattactatacaggggtaaagagttctttgaatggtgctctgaactgacggaaggaaccaggtatgtctattactgccagatcaggagaaaactgaatgggctggaaatccgggaaaacgattccattacactacaggacaggaatttttctccgaaggcaatattatgatccggggcatcatcaaaccggatggatgaagtattgcatgtttctgctgggaagacctttcaaatcccacagtagaaacgtctggttcaagggaatttaattttcaatggatttgaaggcatgcaaacaatttccgggtatccatccggtattataacaaggggatatggctgttaattcttacaaatgaatccgggggattgtttagaataaaccggcattaaccctgctgcaatcactggctttttgcccaaaaatcaggaattatttttacatattattaataacaaacacattatgaaaaattttggtctcactcaatgtatattaataataaatggagaaaggatttttccctgtatacctcaatatatttccccaaaatttgagtaatccgatccaatgcaattctgatgtattgaggcctggttgatcctgtatggaatttggaatcatttacccaagacagctgtctagagcattattttatagataatggatatggagagatttagagcattttattgttaatggagcagaaaatattctcagaatttatgaagacatcatctgcatggttaatatgtaatcctgagaaattaccaaaggaagtaatttaggataaatcattaacaatttaattatcaggaaatccagttggtaaattggcctatatcggagaccttgcaatttttgatcctgcaatccttcaggactttaccctgggagaattccacaataaacagttcgtccttgtctgttaattggcagtattggaggattccggaagaaacagtatccagattgtcgtagtaagtctgaaacagaatgaatgaggttgtggagtcttcgatgagttcttcctgattacgggatatggatttgaggtattgaatcagtttgtcgtatttttcctgtctggataatttgctgttttgagacaatagggtagtggaggctggttcgtacagtctgaaggataatagaaatttgttcatgaccaatattgtagggcaccaaaatgagatcctgcaatagtggaaaggtgagaggtatttctgactgtgcagaaaagattgtcagaattgaggcaggggaaatcaggtatcaaggaataaatttcgagatgtagattgatataagccgttttttctataccattcagagaatatggcaggagggagactattcacagaagaagagcatcaagattgcttggaattctatcaaaagttattgagccaggaaaaatcaaatatctatgagtggacagacacgatgtactggaagcacaaaagaatacgtgtacgtggttcatacagagaatgtttacagaatatttctgcgttcaggaaagaaagaggccttccgattattagcaatttaagctcaaatttggatcattacaatagaaaccaattagtgcgattggcagagaaattttgggggcttaacaaatcgaataatgaagattgatctcagattaaacagtctttttaaattcggcaatctcattgaaatccaggcatttatcatctgattcaacaggattggcaatagtgtcaacatattcgggtgttaagtgccagtagagttcggcatccttttttctggttggcttatagtagtgccttcttatcatctggatgctgttgcccatttcatcagcgacacttgccatgttcccgaaacaagtaaccttgtacgtgcaataactgtggcggaatccgttctgtttaggttcaacggtcggaggaatcgtctttctaaagaaatcatatatcctgttatccttccttttccttttaccgaaattgaataccagtccttcaccacggtcacatgtcaaaagccatttcttggcgatgctgggaagatggacgatacgccttcctgtttttccaccagagagataaaaatcaccgtcttcatcgggattgctcaaatccagttcctcccaggtaatatatccgaattcagataacctgacgccgcagaacatggcgattaccaagggagcgagcatgtctttcctatgattacgggtatagtcaagaatttgtatcgcttcatctacggaataaatgccgggttcaggacgttcagatttaggagtcttgatagcggacatgtcgatttcacaccatttgaagaaggaaataacggccgcacggtagtgctgcctggtcttttcacccatatcaagattgaacagccatttttccacatcatccttttggattgtactgacgatcatgtgtccgaatgattccttgaagacattgacccgtcctaaaacctgcctgatgctgtccttgtttgaaaccatcatcaaacggtgctttttccattctccgtatagtttccgtacagtcttactttgcttgggatgggagacaaaggacatgtatcgcctgatgaattccgcaagaccgattgccggttttcctttatagaaccgttcgatcatgatcttgtcctcagcatccagggcgaattttttcaactaggccggaaacactgagttcagcatcaatggttttacacttttccagaccttcctttttatccctgacacggcatttatttcttttggttgatccgtcagggttgatggtattccagtatactcggaaccttccatcgttttcctggaccagtctgcagaatttgaattgtttcaccgccatgtatgaatacattatatcgcggaaaatggagttcgtacgcggtaaaacccaataattatcagttatttttgtcgtaaaatgcattaattacaccagtcaataattcccatttttgaagccgcgaaaaagcagataatccagaaagaaatggatgaaacccagatgccgatattcttccaattcagatcaccaccatcagttcctatggcgtttcccctgcccaggaattgatacaatcggtatgcatttccaattttgatcaaacatccaaacaggaggtaaaacaagacgcttttcgatgaaccgtttggctttggttggctggtttgtcatccgtataacgatgggtggatagcgtgtttccatgatggtcgcaaatgaagagggcatttcccttgagtatggagacaaactcagaagagaaacccagcagttttcctttttgagagaatagggtttgtccttctgggggtattacgcggacatgtgttccttgttggtaagcagctccgatcatgaacccatcatgtcgtgaaacagggaattcgtaagcgttaaaactctatgatgatcaattattttccttaattgaaaatagaactatttttcgtcctcaatgacctttccaaaaaaagtctgaggcatgattcctttgtccgatccggtttcctggacattcagaaacttgaatccgatatttctcaggattttattccctccatcatagtgggtggcaagacctgcaccgggttttgtgaaatgaagcaggaagtatgattctccctttttgccctcaagatcggaaaattccacgatcgcactccggttatcaatgatcttgtaaatatagctgcctgtccgtttttgatattcgcatgtgaagggtgaggagaaaagtacgtctcctttcagaggtaaatgtccaccttgcgtccaaccatccagttgatgagattccagcaatgccttctcaatgaaaatctgttcttcgttaaccggtaatcctgttttcccttccgttgcatggtattggatatgatccgtattgaattgcagcgtttttcctacaagggattggggcggtttggaggaaaactggcttgaatcttccaaatcaggaaacaggagtgaattgacttcgggaatatctttccgccggagatgcggcttgtcggtctccagcacgaacatgacgttaccgatcagtttttcttccccgttcgtataaacggccattcccgaatcgggagttgtaaagtgcagcagaatatggagattgggagcatccggcccatcgtacttttgaagaatgatcatccctttgtccttgctcagtttcttgtaggcataatctcccgattgccccaatccggcgctccatgctgtaggtgttgtaaattttagcgttccccgtataaaatcctctccctcttctcctttcctccatccggtaagtttctgatagtgcaataactgctgaccaatagaataattattttccgatctcagggaaagataagtgaacacaggatgctccgaagacatggttaaacgtgttcccatcaaagacaatggagcttcggggacaggatgcggattacctgcttggtaaggaataggtggcgtattgtttacgataggtatcggtattgggggaatgacgaattgtgtttgttcttcctcagttgtgctgtccgaatcactgcgttcccttattacaaaatagatggaaacgactgcaacaagtgtacaaacaatgattgcaggccaaatccaagtgtaagaatgtgtttgtttcccattctcaagaagatacgttttccattcctcggcagactggaaacggttttcaatatccatcctggtcgccttgcgcagactgtcggtaaatggttgagaataggaatccagcttgccttccaatagacaaataaacgatcttcccaaggcaaatacatcagaccaggaaccaatgttcccatgtccggaatattgttcaggcggggaataagacggagatgccatgactgtaatagtctcctgaggcaatccatccaaagcggctccaaaatccaataggacaggagaaccgttttccctgacaatgatattggacggtttaatgtcccggtggaatacttcgcaagagtggatataggtcagcgtatccagcaaggaaagcaaaaggccttcaacacggtcactattttccgaatgattttgcagccaaatgtccagcgtatcaccatcaatcaaagccatcactgcataggctgttcccaatgcttgaaaaatatcatgaatacgcaccactcccggatgatccagagcggcgacaatacgggcttccttgcaaaatgaattcagggatcggttataggcatctgcaaggaaatcatctgcgggaatgacttttgcttcttccttaaggcgcttacatagaccttggggaaaatgttccttcaggacaacttcacggccaagctgccggtcaatcgcccaataactgattccaaaccctccctgaccaagaatccccttgatctcataattccctaacaaggttcctatgggaagatggtctgaaagagaagagggatcttccatgaattaaaaaggagtctgttatgatcaggattggggaggcaaaacaaccttttggcttttcaaggcaataggaggatgatcatcagccacaaggccggaaatagcctttgctaccaaatctcccacggttttattctcttttgacgctttggtttccaatttgccgtagaggtcaggagacaatttcacggtcaaagttaacgaggcgtccacttctacgccaggagtatcaataggggacaaggaaacatgagaaaccggcaattgggtcatcacccgttcaatcagttgttgcttcaatacgggaatcgatttttgagacatccagttacggacggtaatttccgagacaccgcattgatctgccatccatttgtaatcaagtccttggcttttcagccattgcttgacctcattcttgaaaatggattgatcccctgcattactcatgtgtcgcaatgtaacacaataatacggaaagacaagactgccttgtctccattagatatatctcaggaatttttactcatggaatcaagtttccgggcaatcaactcacccacggaacatccagcttcaagcgcttttgtgctcaatttgccgtagtcagaaagtgacaattccaacttgagaccgtcttcctgatttcctccaacgaagttcactcgattgaaggaatagaaaaatcggtcaagcgtctctttagatgacctgggaatatctttttgcgacacccatttgagaacaatacattctgtgatacggcattgagaggcgatcattgaataggtcaatccattgaacctcatccagttttcaatacattcctttgagatttgagtgttttcggagtcgcacatgaacgcatcatgccacgaaacaattcattcgtaaattatctttttgagataataattgtttacaaaaatcgcaaaaggagacaatattagtttctcctctgagaattcactcccttcatggtgcaggaaaattccaggtcagaaagaataaaacacccaaccgaatcaatcgcaagaatatgtctacattcatcaaatgcatgaaaaagtatgccagcttttctggcagagctactcgttcagaatactggatattttatctattcacgatactcattactaatcttccggcattgattggcttgattatgataatggcaggaagtgcagagcagaatgaagcagtcacagaaacaggaatgatgttcatagtgattgctgtgattctgagttttgccctattattacctaatttaacagtttccgtcagacgtcttcatgacatcggagaaagcggaacctatttgttcatgggtctaattccgttggctggcccgatcattctattggttgccttttgcaaagacagtcaaccgggaaggaaccagtatgggatttctgaaaaatatccttcatgattctcaacagcaaaaataattgaaagtaatgattatgaatcaaaacaatacattaattgatttaaacttatccggcaatcgatggagatgtataaaatatctcccgatggcagttgtcttatttacttttttatttgatttttgttatgccagagaaaacaaaaatggctctttagttcaagaagaaaaaaataaagatgatttaattttttcaacagaaaaatcatcagattacttaactgtattaaaaaataatactatagaacagttagataaaattttcgaagtcgatcataatttaaaatttgatgatgaaagttcgagaaaaaatctagaatcgaaattgctagaaaaagccaaagcatggaatttgaatttaaaaaatgatttacaacttcaaaaaaaggatgaaattatctatcattggccgtttttttcagatagaaatcaagagaatactaaattattagaacagaaaataaacgaatccctcgtaggattatattctgatttgtttggctgtccagaagttgccagatggaaactggaagaattgagaaagcataaaatgtacacgtttgatattgtttatcatgtattaaatccacgcgttatttcaatcttaaataacaaaaatttaaacatttatgatctttccaattttagaagaaaggatagattaattacaaatctcttgttagaatcacaaataaaaaaagaagtattatctgagaagatcaaaaaaatcagcatagaagacattattggctcatatcctactttggataaactctattacaattcctatgtgttatctcaccatataggtttattcaaagaaaatatacccaaagactgtcaagaattatggacaaatatttacatagaagctataagtgatggaattaaaaagtacaaagataaatttgataattcctgtaaggacattttttcaaaaaaacgagaactaccagaacttacggaagacgaaatcgagcaaagtgtgatcaatggatggaatcacacctcatttaatagattttcaggccaggggatgtttaacagtcctgtaaataataaattactctattattctttttttactctgagtcctaaatctgaagaagttaatgatattgttgatatttgcaggaacaaatttcctcaatttgtacatgcttcatgccttgaaaaattagataaaaatataaaaaatagaagggtcaatattttaaagtatctactgtacaattcaaatttagggaatgtaaaatttgaagatattttaaaagaagaggaagatcctgaaaatattttcaagaatcttgaaccagatggcgagtgggaggacttatcggtaaaacctaaaagtcgagttttcaaagatataagctttggaatgactcttgatgaagttttaaatacagctgcaattaaaagcaaatccattcgcattcaaaaaaattacgataaaaatatactggaaaaagttcacggatattcagatttgtatgcattaacggaattatttggagatgaatctattattaaaatgagatttggttgggtattaaataaagaaaataatgactcattctcatttaaaaaacaactggtatcaatagagtttattccggcaacagctcaacaactgagggaagctaatactaaattgatggaaaatgcgtttgaagatgctgaagaaattgaaggtagtgcaaaaatggcgaaaaatttgagggacattggagccacaaaaactgcagattattatcgaaagcaaagtaatgaaaaatttgattccatgatttcaaattatcaggcagccagaagttcgcaaaaagctcatacagcaactatgttaaaatgggtcaaaggactcgaatcaggagaaaaaccttatcgctttgtcaaaggaattgatctgacatcagactttgaagacttaattggaatgcgcaaaaataaaagttactataccaacaatccctctattaaaattgaaaataataagttgaatatttcttctgtaattaatcaaaatacttttgatattaatattgctgaagtttctaatggtggtttgtgtttctatccagcaagaaaaatggatcaaactcgtaggataagttttataatgaacttattggctaattggcatgcacatgaagttaaacgttacgaagaaaattcaaatattaataaaaacaaaaatgatttttgatatgaatgttggatctatttgctttagctatttcaacacgttaataaggaggatttgttcttaatatactatccttataatggcttttttataaaaatacaaataacaatcatcaagggtgaaatcagcaatggttccatcctttttcatttctacacccatccccctattcctcgccatactgggtacggcaaacggcatggtacccccaccaaatcaaatgcactcctccaattggcaacctatccccattcttcatcaacatatacagagagacttccgcatgaagggggtactttctcaaatgcttcggaaatgtttttctcaaaaaatgaaaactttttctccattaggaaatgtatcaattgggaaaagaggaaagtccattcagtcatttgtaaggcaaaattatttttgacggtaattttttaaatttacgcaggttaatacccattatttctctggaatccttacaaattatcctggagacattcagaataaattaccctccaccgacaaggaatacagcgtacaattgagcagaaacactgtaccatccctccatgaagattttgtacgaagccatttttaattaaatatttccttgtacccattcaaactatcctcatcacttggaaacaaaggaatacaggtcaattaattctaaattgatttctacggaaattattcaggaaggaaggtaattggtaagggcaactggttacaaattcgtagaatcaattctggggatattcagaataaaataacctgcgtatagataatccttcgtatactgcaatctgcattttctcaaatatatgtttcccaaatgattctgtacaatggtgtaatgaagggatataaaacaggtttaatatttaaaaatatatcgtaatgagtaagttatgaaaaatatggtctcatacgatgtatactaaagataaatgagagaatttttaatgtataccgttgtatacctggcattgtttccccggaaatcccatagaattcacaagaacatgaaaacaaataagttataaggaaatagatctcattcaatatatgaatataataagtggaggaattaccaaatgcatgattatgtatgaccggattccaggacttccaaggtcaatcagttttgtacgaaggcattttcaataaaaataattgaacgtaacttctataaatttaatttttttgatttatagactttttgattgcctgtcgcgactactgcgtactgagcattattactttttaaatcactcattatatcagcactcattgctgcagataggctactcattgcatctaaacgagctggcaaatgccccccggtcgtaagcaacatatccattacgcggtattgattcttattttctaattcaaaataaatttgttctattgatacgggaaatctacttttattcacaatgtcaacaaaaacgctttttctcatatcctggatatcatatgcaacaatacctcttcggaaaacaatatcaatccttactttattatgccaaatttgtgacgcaccaacaattatgctaattattgtcgcagtaatgctgaggataaatgatacaatcgtaaacgtacttgtagaatccatataacaattattcgttttcctgctcacctatttctatgcccaattgttgagcaaagcttttattccgcattcttgcgtggtgagctaatgctttataaggaattatttcttgatagaggctagctttgggatcttcaaaattggaatcgaacgctctaaccgctgtgtgaggcttaaaccaatactctccatttggagattgtatgaaatcttgaaccggatcaaaaatatttaattctcctccaattaaataaccatagaatttttgaatcttaatattcgaaaaattagcaatcaatgttgcatattgatatatttgattagtatgttctgatacttttacttcaggtgctttcagctctataagaatacatgctccttcttctgtaaataagaaaatatccggtctcctctttaatcgtcctcctaaagccgtctccatattatgaataagttcagaaacctgctccttatttttgatcaaatcttgaccatctacctgtatattgacaagtgggatatcagaagccattgattgaaaatgtacaaattcttcgttgaaaacccaaagatcatttaatccaccactagactttctcctgaaaatcaaatcatgtattattccttcgggttgattgcgtttattttcttctgatgatcgtgcttggatttctaattcattatctagaatcaactgcaaagtatttactacaatatctcgtcttattacatatttacttaattcatctttattttgttccggtataagattcaataaatttattgtctgctgcttcaatgatttttgaaaattttcatcgcaaggatctgttttctttgcagaaatatcacgtagttttctataggtatgcattattgtaacacttgaatcagctaaacttttaccttgtgtttcgtataatttacgtactatgtctttttctccgtctgttacagctattttagctgaatgaaatgttttatcatcaaaaccatatgatctagctatctttttagcttcattgaggctttcttgagcctcctccaacattggcttaaagacagactctagtgctggcgttatagccctatctatatcatcccaaaaatatactccttctgtttcttctaacatattaggattctcataataattcacgccatatgaatcctttcttttaaataggaaagattcactttcattgtctatattattaggatcgtcaaatatagagccattaatcaatgataaataatagtatccatctattttattctttttgcttttatcaaaaatagaagataattcttttggggtatacgatgtgacaatagtattttttctacatataaaaatactattagtatctatgtttttcggcgatattttatatgaccttatagaaatattttcaggattaccagtcaattcaaataccggctttcttttaggattcgcattttgaactacacgactctttcttatttttactgttttttcagaaattaacgtcggcaaatcgtcttctgttatttcatcagataatatattagaaatattattatttaaatttctcaattcgacagaaaatctaaatataagccctcttgatttttcttgaatcagcagaggtaaaaccattctaataatctcatttttgaacaattttatatcgcaaaatttgccaaattcttttagatcatcgcaatatggatcttgcaacgttaattctgtaatcaattcagaactttcttttagcgaaatatctattggatcagaatcaatctctatgccacatgtcttttcatatttttttaaaatagattccttgtttctatagactgattttatagttaatgttttaaatctgtgaaaaaattgtattttccctgtccctttattacctaaattttttgaaggatcggctaatgaaaaaaatcttttcacgttatcttccgtaaaacctattccattatcagaaatactgacttgttcacatatataatcgtcttctaaaagagttttccttaaaattagtttaatagaaattacaccttctaaatttatgttgtcagcttttcgtcgtatttcgattgattctatggcattagaaatagcctctttaagcacaatcaatggagactttgcttttttaattattttcaatgaatcttgaattgaggtcgtctgtacaaaccctgacataatgagtaaaaattacgatgtattcagtatggggtattgatcgaatcctgtaaagatagaattagagttcatttccccatttcttccccatacctctgcaagcaaaaaccgcaatatattcattacaaatacattgcggcataaaattgatggcggacagggagggattcgaaccctcggtaccggtttgcggtacacacactttccaggcgtgctcattcgaccactctgacacctgcccgttggagattgtgctagataggaaagcaggggcagaataacggcagaagagaggtttggcaatctttttttcatccgaaggggattttcccgttttccccgagttttttcacgtttccggcggttgcgcgaagaggatgaaaagtgccccgacagcgcgagaaaatcttcaacgggcataaacagcaacgaagcgtattttcagaagttttgaaaggaacagggttccgtggttcacaaaaattatccatgagggcatggcagattttcgccctccctgccctgtttttcccgcagagcaaataagaatttttctctttctccacctttacggcttccgtgcaatcgggaaaggttcaagcaagaacctctattgataagcttgcttccgtccgggctccaggattgaccagcagccgtttgaggagtttcaggagcgagacgggaagagaagactgaaagattccggaagcccagggttccgagagtttccgggaaggcgcggcagaaatgggaacccacgctgtgagaagagaaagcgggacatgccgtttcaccgcgtatcatcatttccgaggctccgcattcctcccgtcctcaaaaaagggcaaaggcttccggcatgtcccggaaaaggcgtttcccgaccgcacttcccccttgacggatgccccaaagacgggtttgctagtcctgcgcatgggagagtccttttacacacgcaccacggaggccccctcctccgccttcgatttgtccctcagaccgcccgctttcagcgagttctgcggccaggagaagattaaggaccgcctgatgctgatggtggaagccgccagacaacgcgacgacgtgctggaccacatcctgttgagcggcccgccgggcctggggaagacgacgcttgccaatattatcgcgaatgccgtcggctgccgcattcatacgacttccggcccccagattgaaaaggcgggagacctggccggcgtgctgaccaatctggaaaagggggatattctgtttattgacgagatccaccgcctgcacccggccattgaggagtatctgtacccggccatggaggatttccggctggatattatcatcgaccaggggccaaatgcccgctccatccagctcaacctgcccaagttcaccctggtgggggccaccacccgcgccgggatgctgaccagcccgctgcgttcccgcttcggcctggtgaaccggctggattattatacgcgggaggagctgtgcgccattatcgaacggtccgcggggctgctgaacgtgcccgtggccccggagggcgccctgcagatcgcgctgcgctcccgcggcacgccccgcgtggccaattccctgctgcgctgggtgcgggattacgcccaggtgcgcggcgacggcgtgattacggagcagttggcgcacgacgccctgaccatgattgagattgacgacgacggcctggacgagatggacaagcgcctgctggaagcgatgatttacaagttcaacggcggcccggtgggcctttcctccctggcggtggccgtaggggaggacgcttccacgctggaggacgtgcacgagcctttcctgattatgcaggggtatatcagccgcacccccagggggcgcgtggcgatgccctccgcctatctcaagatgggagccgcgccgcccgccaacggccaggggtggctgttgtaagccattcatttacgacatgaaaggagtcctgcgttttatgctggtcatcaggccctctttcttttagactgtttccacataaaacgtcaggacgttttctgttcatcatacgcccaaagctatggccgcacattctgatattccctttaaaagactgcccgtcaagattatcggtacgggttcctatgttccggaacgccgcctgaccaatgcggatctggagaagatggtggacacttcccacgaatggattattgaacgcacgggcattgtggaacgccgcatcgccgcccctgacgagtacacttcccatatggggacgaaggccgcccagcgcgctctggaatcctgcgggctgaagccggaggatattgacctgattatcgtcgccaccatcacgccggatacgttcacaccttccacttcctgctatatccaggatgcccttggcgccaagaatgccgccgcctttgacatttccgccgcctgctccggcttcctgttcgccatgaagaccgccgtccagtacatcggcaccggccagatgaaaacggcgctcatcatcgccgctgaaaaactttccaccgtcgtcaactgggaggaccgcagcacctgcgtcctgttcggggacggcgccggggcagccgtgctccaggcttccacaggggaagagggagaaggttccgtccttgccacggatatcggttcggacggctccctgcatgacctgctccagattccgggcggcggctcccgctgccccaccacagcggaaaacgcccatgaacgcctggctaccctggccatgcgcggcaatgagaccttccgccatgccgtcacgcgcatgaaggcttccgccgccagcgtcattgaacgcgccggcctcacggcggacgatatccagctgattattccccaccaggccaatctccgcatcattaacgccgtagcgcagcgcctttccattcctgaagataaggtgttcgtgaacattgagaagtacggcaacacgtccgcggccgccgtcgccatcgcttttgacgaagcgcgccgttccggcagattcggcaagggagacaacgttgtcctggtcacattcggcgccgggcttacctggtccgccgccgttatccgctggtaatattctttttcaccccccctccatcatcatgaccactgaaccatacggcaaaaaaaatccgtttcccgctcctgtcctctccgtcaggcatatcaccggggaaggcagccccaaggaaaccatccacattgaatacagcctggacggttccgggatgaactatattgccggggacgccctggccgtcattcccgccaatgatcccgccctggcggacgccctgattgacaggctctgcctcagcccggattcccaggttcccacgcccgaaggggaaaccgcaagcctgaaagacgccctggttcactgctatgacattaccaatgtcaacaaagccctgctgaccaagtgggccgccgcctccggcagccaggagctggacacgcttctggccggggataaggacgccctcagcgatttcctgtggggccaggacgtgctggatctggccacggaataccccgcttccttcgaatccgcggaggctttcgtcggcatcctgaaaaagatcatgccgcgcctttattccatcgcctccagcccgaacgcccatcccgaacaggttcacctgtgcgtgggcgcggtgcgctatacggcccgtgaccgcaagcgcggcggcgtttgctccacctatatggcggatcgcctccagccgggccatacggccagggtattcgtacataccaacaagaatttccgccttccggaagacggggacacccccatcatcatggtgggccccggcaccggcatcgcccctttccgggcattctgggaggaacgcgccgcttccggcgccaagggcggcaactggctgttcttcggcaatccgtacaaggccaccgacttctgttatgaagacgagctgaaccagttgaccggcaccggcaaactgaagttgtccgtggcctggtcccgcgaccaggaaaagaaggtgtatgtgcagcacctcatggtccaggaaggcgaagagctctggaaatggctggaagccggcgcctgcttctacgtctgcggggatgcctcccgcatggcgaaggatgtggacaacgcccttcatgaagtcatccagacctggggccataaaactccggaggaagccgcagcatatgtggcggatatgaaacagcaccgccgttaccagcgggacgtatactaattcagggcctcgcccctgaacctgtcaccgcgcctttccatctttcttggaaaggcgctttttctttttccggagaaaatccttcacgcatcaatccggctccccctcccggcttctttcgagccggagaagccatcttccgcccccctctccatcaaaaacaacgccgaaccggggagaacccgtccgagcaaaagttcccctccttcttcaagcgtttccttacccttattccaaatcctgccgggcgccgcaaacggcccgtttcactttcctgagcttgaaaaagaaaaccatgcagaataaatacagcttttgcggcaggcagtggacgatacccatccatcccggccgcctcaacgcccatctccgtcgaaagggataactccaccaattctgctgccggtcaatgctgtctatgatttttctcctctccttcatttcggcaagcagttcttcccgcgaacgaaaaaccggagcaaggccctccagcaattccccgcacagttccaaccccgcctccttgctttttttcaactggcttttcatttccagctcccttttttcaaaggccgccgccgcccgcatgtcggcaaaccggaacgcgctgttgacagcgcaaatatttttaagcgcaaaccggtaataatataaggatatgcccggcatttcataaatgttgccctgaagccatgcgtggaaccccatcaagtcgtcttcaaaactggccgtcatccgcagggagctaccccattcgcaggcgctcttcctgatcatcatgcttcctccgtaatgggcggaagaagaaaaagctcccgcctgaagcacaacagccggcatttcccgcggagcagcaggaaaggccgggaattcaaacgcaatgcccggttcctcatagacgctggtcatctggctgaccacagccacggcatccgggcgttccatcactgcccaggcaaaaagcctgcatctccaggggaaagaacaatcgtccccatcctggcggagaatccattcatgggaagccagaccaaccgcctgccggatatgaggcccgcgccccagcggcgtttcattccggtttaagattacccggtacggccccctgtattgagccgccatttcctgcatgacggagaaggttccgtcggaagagccgtcatccgaaaggatgatttcaaccggcccttcataatcctgcccgaatacgctccggatagcatccctgatgctgctctcctcattatgcccggtcaggataatgctgatggaagggagttccgaagggttcatgaagaaaaagcacggaaaagaaagcgtcaaacatgaagaggaccatgtccttttctgtttattaataaggcatcacgttcataccggattccaaatccggggtcaagggttgatttttataccaaggaacttatgttgtgcggacgttttgtcatcaagaatctcccccttgcgggcagggagtccgaagccgggaaaacaggacgaaagattctgctttcccttactactcccaacatacacattttttcataagcaattattttttagaatcatagaactcttagaaccagacctagccggaatacctccataccccaccggttccatgaggtcttgggacaattctctgttcattcatgctgaatccggaatttcccaatcgaatttggaattcgctatgacaggttcattcgcgcactgatgaatcatgggaggaacgatggattcgtcctcctgccattcaccggttgcaatggttacagccccatcagaatcatgttctccatatcctgattcccgttccactcacgaagcagttcatcattccccttgtatgcagaaaccgttcttcagcattattatcccggcctataatctggagaattatattgctgccgcccttcagtcagtactggttcaaacatttcaggattttgagatcatcatcgtggatgacggttctaccgatgagaccgtttccatcatccaatcttttcatgaccccagaattcgcctggtttcccaagttaacggcggcgtatcgcgagcgcgaaacgcagggatgaagaaggccgtgggggcttacatcgctttcctggacggagacgattactggtatcccgagcatctggagctggcagccgattttttcaaccgtcatccggagatattggcctatgccaaccgctacatgagagatgaactggaggccatcccgccgcgacctccatcttatcccgaatctatccggagattggggatacggggagtgcttttcatgaattccagcagcgtaatcctgaattcgtctcttgcgtcccggcttcccccctgggaagaagcgatgccctatggggaagacggcctgtactggacacggtgcatgcgggggacaggcctgatcgggctgggaggctccgtcacctccatttacaggcagagagcttcttccgccatgcatgatgagcattaccagcatgtctccctccactcgctcattgcgcctctgctgaatgagcttgaagccatgaaaaatcccaaatggcaatttgccgtccattatctggtcatcagggaattgcatcccaaaagactgttatcgctcaacgcagaggagcggatttccctgacgggcaggatcaggaaaatcatgcacccatgcctgaaccggccgtttttggactcctatatgaaagcgtgttccgcaagggcaggcatggaacagtcattttccgcgctcatggacagaaccatgttctcctgcaaatggctggaccgcctggaaaggatgggccgctccctgtttttccggctacaaaccaataacggaatggagagcaaacaccaagatccagcccgttcacgctcatgaatatcgtatacgctacagacgataacggcgcgctgggaacgggcgtgagcattgtgtccctcatggagaatttgccgcccggcgttcatgccgatatttatatcatgactggcgggttaagcggggataatacggcccgtttccattccctgcaacagggctacaatctccatttgcacttcattgacatgaaggataaatatacggatttccccgtcggttccaaatggtcggcggcgacgtattaccgtcttggcctcgcaggggaacttcccgccacggtagaacgcgccctttacgtggatattgataccattttcaacagggacataagccccatgtatgaatccgaattcggagattgcctcattgccggcgttttcaccacggaagatttatccgaggagtctttttctcgttggaagagagaaatgaatctggaccgggactccatttacatcaatgccggcgtcattctttaccatatcggaagaatacgtgaagaatgttttgaatcccaggttttatcctgggcgaaaaacaatattcaccgcctttcctggcaggatcaggatattttgaatgtatgctatcagcagcgtatcttgttgcttcaccccatgtggaacatttgcgacggggctatctggtgcattcgctgggaaggcgtaaaaagcttcagaaataatcccctaaagccggcagacctgctggaagccgccaggcggccgggcattatccactactggggccatcccaaaccctggcatcccaacagcattcgccaggattacggattgttctacaagtattggaagaaatctccgtggaaagaggacatcagggatttccggaagcaaaacgatcccggccggatgttcatctccaaaatgagatgcctcctgggaaaaggtaaacggctcttacaaggcaggcatcagtagaaatacggagggaaggccttatttttctgacacccggccatttacaaaaccgccttttatggggaaataccggagccggctatttttttaacaagccggctcagcttcattccggattttcccgaatccggaaagaaccgcccgcatacttcttcagaaacgtctcaacgttttatgcctgatgatctttccggagttttatcaatagttaaaaaaataatttatttatgaaagttgatactattaagggaagttcctatgtcatgacctgtacaaaagcttgtactgtaagcgccatcttcaattccggagagacgtccatgcttattctggaagcagagaaaaaagggcaatacggttttgcggctccgacggacgccgtcgaagtatccgatgaagaagccctgatcacccaggttttcaaaacagccgttccagggttgccaggccagaacggcatcaggcaaggagaaaatgccgaattaaaaaacctgacggctgagtccgggacttttgcaggggccgtcaacgccaacggaggcatcaacatcccgctggccgtgggggcggcaacggatacgtcagcggtcaaccgcctgtacgccgccgggctgtctgccgtaactgacgctttttccgtcaggtgttatccgctcctggcggattgctcgtcttccaatgggacggttttcaaaacagacaaggaacccaattccctttatttcaatgtccctcccaattccgcttttaccgtgaaatgcggcctcgtgaccaacgcgaggcccatgcacaattattccagcatccgggggtgggtggccccgctgcggctgccgtctgtcagcacgaaattcacggccaggttcggccagatgacaacggttgcgcgcatggggcgggacagggacgcatttacgctggtgccggatcaggcggctggaggctacaagattggggagattatcgatattacgtttgatcctatccgggacgcggacgcggggggataccgcattcgtgtccgggagatctattattccaatgccgaacagaaatggaagatgaagacgacgcaggccttcgcgcaagagacgtcttccaataacggttatcccgtctgcgtgtacgcggtggtttacgagcaataccaggacggaggatatgatactgaagacaggggtgcgctgtggctgctgcatggcgggaattcctcccgcagctgcgtcaaaatcgccacggtgaagggagtccattgctttgagagtatttatccattttccgggtactatcttgatatggagaataccaacagctgggcgttgtccggagctttcctacctgcgacgatgcacttgcattgcaataacgtcaatccggcgtattacggtttttcctccatggagagcaatatcattgtctccgaggcggtggaggattttgttgacccggaagccgaaacaattaccgaagattgagcatgaatgacgcagcgtccccattcccgatacccagcaacacctctgcgtccctattcagtttttttccgccacggcaaccgggttcccgccatctccagcgcacggcgcaccattccgcgcatgccctgcgtaccgcaatacattaaaagaaccgtcacacctccataagaaacggccatgaggaaggcacataaaaaccaggaaaagaaagacgcggaaggctgcaggggaacaaatttccagatccagcccatgaacacggccgaaatcaaaatcagcgccagctggtaaccgaattggaaccagtagttcatcacatttttcctgaatccccagttatacagcatgaaaggcttccatatgcccacaataagtatcaggctggagatgccccccagcaaaacgccgggcaatccccataaataacctccgatgatcgccacggaaatgttgatcacgctttccgcaagaggagcccatacatcccagaacaaaccgtaaccgtataaaaactgatccacaaccccccgcgtaatggtaatgaacagcctgataacgagcagcagcatgatttcccggggaaggatatagcccgctcccagccaaagcgtgatgaatggctccaaaagctggtaaagggggaaacataccgtcccggcaatcagcatgcgcagggaaaacaattcactgaacaccttgcggatttttcccgcatttccctccgcaatcaagttgcccacactggcttccgtactgccgagcagattattgaccagaaggtgcagtttctccacaacggtggaatagttgccgaagtaggccgccatctggagggaaacaaaggcatataccagaaacggcgtcacctggaactggaaaaagcttcccagtcgatgcataaacaactgcttggtgtatttagtgacttcaggatattttttgaacagctcctttcccagggccacattgctcttcagccagggatagacctgattgatcttccaattcaggatgaaggaataaataatgccgaagaacagctctatccctatccataaataataacttcccgtataccatgcagacagcatctggcatatgattttgatgatggatgccgtctggaaataaaacgccactacgtaattcctctggtccgcccccaaaagggtctgcctgtagttggcaaaatacccgatcagggaagaggccagaaaggaataataagcaaaatagatgattccataggaaaagcctgtggaagggaaaataaccggcaggaaacaggaaagcgctactccagccgcgatgattatccgccctatccaccggtacatgtatcccagcacggagataatttcattaatcctggtttcatcatgctcaaagataggcttgtaaagcacatatccgatagccgtgcttataccaagttccgccaaattgaggaaattcagcagactcattaatgttcccgtcaaaccgacaaaatcggcacccaggcaattcaagaatatcttccttgaaaaaaaggaaatgagaagaatcaaaacataaaaaatgagattgaccctggcgttcaacaggcttttctttacgcgggattcttccatgttatttattccatcaaccttatcctttcccgggagaaattaaaaatatctgttttactgataaccggattatttattcaaccgacaatatcccaacggcatattgcggccatacgggcacggaaagcggcgccaatctagcacaacatcctgccgcatcaatatctttttatgaagcctcagccaacaggccttcacaggagatagaaaccgggcagaatcgcctgttcccatgacgcctccttatccgctcaccggataaaaaacaaattcctcatttttacaggttccatggaatggaacagttccataaagtgtccttgttttattttttcttttcatctacattaccgcccgtgagcaagggcagggttctcatcgttacatatgtttttcctccggaggaaggaggcgtaggcatggctgcctatgaaatggcctgcagcctgagttccctggactgggatatccacgtcctcacccgcccgctggattcaccggatgagtccttccgctcccacccatacagccctctcacaaccctgccggacaccctgacggaggacagcgcccgtttaagggaatacctggacgggtttctgaaagatttccggccggatgttattatctaccactcctgggcggactggtgccgggaagaattgctggacgcggcacgggattcaggcattccgtttttcctccgctcccatggtgcagctaccaatttccgctcttttttccgcttcaattaccctcctttcttcggcctgaaaaaatggctctgctccttttttcaagtacgcagggatatcctcaacgtatgccggaaatcaccgttaaaccgtctcgtttttctcgatccttacgggacactgttcaagagctttgattattactgcgcatccagaagcaaacttgcccattactcctgcattcccaacacattcccggctctgaaaagaaccgctccttttttccgggaaaaatacggactttcctccgcccccgtttttacctgccctgccggcgccagcatgaggaaacggcagcttctcttcatccgccatgtgaaacgctcccgtctgcggcatatcatttttctttttctgattccccagcacaatgcctacgcggaacaaatggaacaagccatcggggatgaccccagattcaggattctctacaggctcccccgtttggaagtagaagccgccattatggaaagcgatgccgttttcctttactcttatcaggaacagcagcccctctccattctggaggcgatgtcatgcggcgttccctggttcgctccggacgcaggagctctttccaccctggaggggggaatcgtcctgaaaaacacttccccctccgtgctggaaaaagccgtggaatcgttgacggacgaaaaaacacgcaaactactggggagtaaaggccgccggcagtgggaagcctgtttcgcccccgacgcagtaaaccaggaatgggagcaactgcttttttcctccatccgcccggaaggaaagcctccgttcgcgtcttccatcgtctgggagcatttacccacctgctaaccttgcctcctctttccaatccatgccgatcaaacgcctccgtcccgtattagccatagcagcggacctccctctgggccggctgctgacgtctttccgtaataaggaccggcgtacgattccctggattttttccctttttcatgctctggaatctcaggaagattttgacatccactggatcaccctcagcaaagccgtttctgccccggaaaccatccggatgcgcaaccagaccatccacattcttcccctgggcagcatgggcaggaatatcctgacggcccatttcctgaccgtccggagaatacgcaagaccctgaacgatatccagccggacctcctgcacgtatggggcgtggagcaggcttacgctctggcggggattgccttccggggaaagaagctcctttcctaccagggagccctcaccgcctactgccagcgcgctccgcaggccttcctcctccatatgcaggccctctgggaacggatggccgtcaaacattatgatcttatcacgtgcgaatccccctgggcgtgcggccgcgttgcggaaattgccccccatgcccgtctatcctgcatggaatacggcgtggaaccttccttttaccatcttgccagaaaaccttccccggaaccttcctgcctctttgccggaaccatttacgagttgaagggcatttcctacctggtggaggcctttacgcatccgtccctttcccatgtccagctgttcattgcgggcaacggagccctcagggaaaggctggaagccctgtccactcccaatatccactggctgggcagcatttcccgcgcagaacttcagcagcacctttccacggcgtggttcctggtgcatcccaccctgggggattgctgccccaacatcgtgaaggaggcaagagtcatgggccttccggtaatcaccacggaagaaggcggacagactcaatatgttcaggacggcgtatccggctatattgtccctgtccgcaacagcgccgccgtcagggaagccgcgcagaaactttccgtcagcctggataaagccatgtccatgggaatggagcggcatcaggaatgccgtcgcctgctggacgtaaagcagacagtaaccgggtgcctgtcacgttatcataccatgctgtatccacgctgatgaaattattccttatccatctgctttccgggataggccgcctgctgctcaggctcaggggggtgcgcaccggaacaggcatcattctttccggatttcccctcattaaaaaattcccgggagcgtccatcaccatcggcaacggagtcaccatccactccctgacccggatgaatccggtactttcccatcacacctgcctggccgccctttccaatcaggcaagcatcattctggaggacggctgcggcatcagcggagccaccctggtctgcgtcaacggcatccgcatcggccgccacacgctgataggagcagacgcgctgattctggacaacgacatgcactatccccggagcggcgccaggtggggatcaaccctgggacagcccgaacagggacaacccatttccatcggggaaggatgcttcatcggcgccagggccaccatcttgaaaggagtcaccatcggctccggttccgtagtcgccgcaggagccgtcgtcacccgggatgtacctcccggctgcctggccatcggaaatcccgcagtaaataaaccgctccccgaacgtctcaaacatccccgggaaacacaaaaagccatctgcccttgagcatttcccctgcctgcctcagggggctccaaaggcagactctttcatgacaccgcaaaatcctacaattttattaccctcatcccgggaacattggattgacatatcccgattcctcgcggcatgcctgattgtatgcgtccacgcgccggccttctctttcgccagcctgttccagcttccggttttcaacggccgcgtggcatttttcctgattctggcaggctatttcatgggccggaataattcctggaacaaagcgttcaaacggggttatacgcttctcattccctttctgttctggaatatagtcatctctttcctccatccgggaatcatgaatatgggactgccggaatacttatgcaaccttgcaggcttccgctcccttttcactcccgattttattcctctttccatcaatggattgacgggagaacccttttcccctcccacatggtttttgagggatatcattctctgttccctcatttcccccatcctgctgaaattgaaatatccggtttttgtcctgatcctgatctgcttcagcacggactggctccaataccccgtgccggccaacaagattacccttgctccatccactgtctccctgttcagtctgggccttttcctgtcttccatcaaactggctgaagtaaaacacgtttacaaaaattcctttactcccctcgttctgctcgccgtaggaaccgggtttctgctcagcatcaccaattacttgagcgtttgccagaataacccggaatggaacatgcacaaaatactggcatcctatggagtatggaatatctcctggccggctgtccgtttgaattccctctgcccagtcttcggggcgcttcttctcatggcccttggaatctggctggaaaagaaaattcccgttgccagaaagctgtccaactatgctcccgcctgtttcctgatattcgttcttcattatcctttgatcatgctgatcccctcccacatctggaaacaatcctttttcgctccctttgtattaataccggccatcattttcctgatcgtcgcattctatcttttcctgagaaaattcttcccggcctgcctgccctacgtcgccaacgaccgcatcacccatgttcccaaaaaaaattaaggcctgtatcctctttcttcttttaaccgttccggccgcattaggcgccgtctggtgcgccaaacacgcctaccgctaccatttggctgtccatccccttccctattccccggaacagggcgccctgctggaaaaacaccggcaggacaaacgcaatgcccggctgaatccccatgcccccgtgttgttcctgggttcctccaccatggaattctggctgaaagaagggaaacattcctgggaaacctggttttcccctctgggatgcctcaacctgggaaccaggagcgagaccacgggcaacctgctctggcgcctcaatgacggcctgacaagcccgctggcgcccagaatcatcgtcctgtattcgggagtcaacaatctgggagtacaaaaaagcctgggatggacggcttttcagggaaacgtggccatcgtcaaaaaaatcagggagatttacagcccggaaacgaccgccatcattgtcattcccccgctcatcgcacaaaaagggtcgcgcatggaaaccttcaggaattgtctgctgcaacacgactttggagaaaatgtccatgtcctccccctccatttcttccttccgggaaaagacgccagcctttatacttgggacggcctccatctcaacgccctgggatatgaagccatttcgcctccgcttttccgcttcctccaacagcttttaagcaggagcagcttttagggcttcacaggaacaacaaactttatccgccattactccacgtgatgattgaatcttctccaccccatcaggcaacacttcccatgaccctgtttctggcaggtcccaccggatcgggcaaatccgcggtagccgtggaactggcggagatgctggacgcagaaatcgtcagttccgacgcttaccaggtgtaccgggagctgcccatcctgacggcggcgccttccccggcagaccgggaacgggtcccccaccacatggtttccatcattccggtccaaaagaactggaatgccacggaacactaccaccgcgccatgcgctgcatggaagaaattcacgcacgcggaaaaatcgccatcgtcacgggcggttccggcctgtacttcaaattcctctcccacggcctgtcggaagcgccgccgggggacgctgctctccgcgccgctttcgcgaactgttccacggaagcgctatacgccagactctcttccctggatccggaaggagcggcctcgacggatgcctccaaccggcgttatgtggaacgcaatctggaaatcgtccttgccggaggaaaacctctttccttctggaagaggaactggttgaccccgccgcgcgggcccggctgggtcatcagcagggatgttcctgaactggacgaaagaatagcccaccgtgccgcacgcatgatgcaggagggggccgtggaggaaacggcttccctcggcccatgctccgccacagcggaacgcaccctgggcctggcgttgatacgaagcatgctgcgcggggaaatctcccgtgaaaactgccagggccaactggccctcgccacccggcaatacgccaaacggcagcgcacctggctgaaacgcgaacaatggcttcggaaacttccggcttccccttccgactctccccgggctcttgcagaacgcatcatggaagaactggaacattcacccttgtccatacggcggtaaatatccggaaccgtcccacaacggggaaaatgccagacgccatccatgatgcatgccgcaacgaaccttggacacaggatgcgcatggcaaattgagcttacgccacccgcttaaaagccagagatctgtcgaaagctccgccgaataaccggatcaggatgcctgtcttccgcgctttttgtcttggcttacggaaacatctttggtttacaggggcaggcggcaaagcctttctcaaagcggtccgccttatcacccccatatcttttccagcatcgtggcacgcatacttgtaggcttatcaggcggagtggacagctccgtggcagcggccctgctcgtggagcagggccatgacgtagtgggggcctacatgaaaaactgggtgaatgacgaaggcattcccggcgaatgcccgtgggaacaggacattcaggacgcgctggccgtcgccaaaacaacgggtattgaattccgggtcattgacctggtggacgaataccgcgcccgcatcgtgaattatctgattgaaggctaccgcgccggatatacgcccaacccggacgtattgtgcaaccgggaaatgaaattcggcgtctttctggattatgccctggaacaggggttcgactacgtcgccaccggccattacgcccgcaggatggacacgccgcaaggggctttcatcctgcgcgggcgggacccgaacaaggaccaatcctacttcctgtccctgatgcgcccggaccagatagcccgcgccgtctttccccttggggatctgctgaaaccggaagtgcgcgttcttgcggaaaaatacggcctccccacggcacgcaagaaagacagccagggcatctgtttcatcggccaggtaaagatgagcgatttcctgcgccactacctgccggacaagcccggcaaaatcgtggacacggaaggccggacgctcggcacgcacaacggcctgcatctgttcaccatgggccagaggaaagggcacggcgtcgcctccccgcgggagggagtcgcctatgtggtggtgggaaaggatgtccagcgcaaccgcctgattctgggatacgaagacgcgtccacgcggggattgtacgcatcccgcgccgtggtcggcggcatttccaatacgctcgctcccctgccggcccgcgtcatggcccagccccgctaccgggccaaggcggaatgggcctcctgcgaatatctggaagaaggaaaggtgcgcctgggctttgacacgcccctccgggccctggccgtgggacaggtctgcgccttttacgacggaggcaagttgctcgggggcggcttttttgaatccatagaaccatgactgacccggaacgcaccatagccgcacaggccaccgccgcaggacagggggccatcgccgtcatccgcatgagcggttccggctgcatggacatcctgaaacaatgcacccctgcggccttcacggaacgcctccagccgcgcagggcgacgctggtttgcatccgggacgcggaaggagccgccattgaccaggcgcttgtcacctggttccccgccccggccagttacacgggggaagataccgcggaaatatcctgccatggcggcatgctggtgacggaccgcctgctgaaacgcctctaccaatgcggggcctccccagcggaaccgggagaatttacaaaaagggccttcctgaacgggcgcatggacctgacccaggcggaagccgtaatggatgtgatttccgccgggagcgacctggccctgaaagccgcgcaaacccagctggacggaggcatcggcgcccaggtggacgaactgaaagacaacctagttcatgtgctggcccacattgaggcctatattgattttccggatgaagacatttccccggacaccgcctccgatctgctggcgcgcctccggagcatggaggaaaagctggacactctcctcaaaactgccgaaggcggacgcctgctgcgggaaggcatccgcacggcgatcgccggacctcccaacgtgggaaaatccagcctgctgaataccctgctgggatatgaccgggccattgtcagcaatattgccggaaccacgcgggacacggtggaagaatccattcagctggccgggctggccctgcggctgattgatacggccggcgtccgcgaatcttccgacgtcattgaacaggcaggcattacccgcaccaacagggcgcttgaaaccgcggatctggttctggaagtggcggatgcctccacgccccggatcaaagacttccccgcccctgttctcaccgcgccccggctgctcattctgaacaagtgcgacctgggaatccatccggactggaaggccgtgcccggcatccggttttcctgcgccaccggggaaggaagaaaggaattggaggaagccattatccaggccttttcctcctccctgcccggtgaaacgggcagctccctggtagtcatcaatgcccggcaccagcatgaactgggcctctgccgagagcatgtccggctggcttcggaatccatctcccgccaggaaagtccggaattcacagccctggaactgagagaggccctgacgcacctgggggaaatcaccggagccgtggatacggaagacgtgctgggcgctattttttcctccttctgcctggggaaataaagctccggaaaatccggacataaccattcaacaaacagctcttatctttttatcatgcctcttcccgccgtcaaatccgtccgccagatcatttattaccaatatgccaaaatcattgcctcctcctccggttttggaaaggctcattacggcatgattatgagcaagtggaaggatctttgcgcagggaccatacattggtcttcctccgtacgcgaatgggtcagggaaagggaacatcccggggaatgtatttattgcggcggaaacaaggatttgaccacggagcatatcctgccgcgcgcctgcgggggagaagatattacggacaatgttgtcagggtatgcaagtcctgcaattcttccaaggggggaaaacggctttacgaatggaaaggattaaaggaaaaggataaccaccaccgtatcgcggaaggaaaatacctgaagtacctttattcccttcatgaaaaacggggaaccctggatgtaacaaatgtgcgggagctgtgcccgcattgcaacatgcgctcctgctgtgaacgggacgggacggtggagaagctttccgtttattgcatagaaggatgtttccacaagtagcgcgtattaccggccgccgggcttcctggaaaaaatttccttttcctcttcctccaaggcttccggctccgcatccgaggtgaataacggaatgtaggaaggcaggttccagttccagcggatggccgccaggcgtacggaaagcgtgaccatgaagcccgtcacgaagcaggtggaagaatcaattccggcatagtaaagcaccgcgtacgccacgcctcccagcagggccgcggtggcgtatagttctccgggacggaacacgtagggaacgttgccggtaagcacgtcgcgcagcaggccgcccgccacgccggtacaaatgcccatcatcacggaaacagtgggcgtatagccgtggagataggatttttccgtgccgatcatgccgaaaagggccagaacgatagcatccgccacgcggatagtgcccatgggaggcggatatttctgggccacataaaaggttgccagactggtgacgacggaggccagaacaaaaatttccccggaggggagcgtccagtacaccggtatgtccagcaggatgtcgcgcacggttccgccgcccagcgcagccaaggtgccgcagacaatcacgccgaacaaatccattttcacccgcgaggaagcgatggaacccgccagggctccaataatcgtgctcatgatttcacaggtggagaggaacatggcgggaggaacaggaaaaaaggcatattcagcagacccgtatccacggcaggcaggagtcctggctggcgcagaacagggaggtggaagccagccccatgtcatgcagggtatcacgcatcaggctttctgccaatgccggagaattgctttctacgctcagatgggccagcaccacgtttttcaaggctccatgagcaatccgcctcagcaggtcgcacgcctgcccattggagagatgaccgtgcgcagaagcgatgcgctgcttcagcggccagggccttctgggagtggccgccagcatgtccggatcatagtttgattccaccaccaggctgtccaccatggcaaggtattccgctatgcagccgggagcctgccctgtatcggaaatgaaacccaggctggaccgctccgtttcaaatttgaatcccaccgggtgcacggcgtcatggtaagtggggaagggagtaatgacgatatcccctattctgaaagactgccccttttcaaaataggcccagggagcctccggcgctttttcctggacgcacatggccgtatggcgggtggcgtaaacacgcacggcatgctttctggtgaactggtgcacgcctttcatgtgatccgcgtgttcgtgggtaagcagaatggcgtccagctcatccggctccactccggcggacttcatcttatcccgcagcctggcggcgctgaacccggcatccaccagcaggacggtttcccccgccctgacaatggtggcatttcccccgctgccgctgcccaacacgcaaaactgcatcatgcgcggaatataataccgcccccggaagggagcaagaacgtatccatgctttttttatgacatgggcacatgaaaaaatacttttttccagtacggggttgacatttcaggtgcattaaagtgtattgaagtcactacgtagtgtacttgcatgcgatgagcagtgtatcagacaacctttttggtgcatacacgcacaagctgaaccccaaaaaccggattgccattccggccgaatggaggccctccgaaggttgcgccctgctcctgttatccggccggcgtcttgatttgccgaccgtcaaagcctatacgcgggaaaaattccagcaactcattgacaagatagaaacaacgcccggctacacggaagcgcaaatcgacctgttcatcggcaaattatacgccaactgtgtggaggctgtcatcaacgcccaaggcaagctgctgatacccaaacaaatgtgcgaacacgcacagctcagttcctccgtccggctcgccgcacggagaggatatttcgaattgtgggaaccctctctctacgaagaagtttcccggcgtgaaaacgccagcatctccgacatcaaccaatcctacggcattctctagctttccttcatgcccccagactcctccattacgcccaatccccaggcacgcccctgcgcaacgcttgcattgcgcccgggctggcttgcttccggcctgggcgtcggcgccagaaccgggctgcatgcggaactcacggcttattccatcgttttctgggggcacgatgcccttccggcgcaggatatggttgcctggcagcaggaaaaggcacgcctcatggcggagatgtccctggccgggcaaaagggcgcctatggcaagctgggcgcattgtcttccggcctgacccgggcttttgacgaccatattgagctttctttacgcgcgggcgcgggtacgcacgtccgcacggaggaggtgcaggccctggcaaacgggctcgcggaagaaacgtcctgccgcgtgctggcgtggagcgtctgccgcaaccatgtgcatgtgattgcggagctgacggaggaaaaaggagtggatgaactggtctgctcctggaaggcgctggccccctccatgaactgggaagacgcgtaccacacggaagccctgaaagcccgggaagccgcggccagggtagacgccctgatttccgaactgggggatgacgccgctgccgccgttgatgcggaagcggacggggcagactccggaaacggcttccggcacattaccgtgctgctgcatgagacggtggacatgctgaaggcaggagccggcaaattcatcgtggactgcacgcttggcggaggcggccatacggaacttctgctggagcagggagccactgtctggggcattgaccgcgatgcggacgcccgccgcgccgccatgctcaggctggcgcgcttcggttcccgtttcaaagtcctcgccggcaacttccaggacgtggaaagcattctttcccagcagggggtttcccgggtggacgggctgctggcggacctgggcgtttcctcccaccagcttgacaccgcctcccgcggcttttcctttagggaagacggccctctggacatgcggatggatacccgcgccgctctctctgcccggaacctggtgaatgaggccccggaagaagaaatcgcaaatatcctctggcaattcggcgaggaacgcgcttcccgcgccattgcccgcgccatggtgaaagcccgtgcccaggcacccatcaccacgaccgcacagcttgcccgcatcgtggaatccgtcctgccgcgcaaaggaaggcagcaccccggcacccgcacgttccaggccctgagaatagcggtcaacggcgagctggatgccctggacgctctgctggattcctccgtgcgtctgctcgggcagggggggcgcatggccgtcatcaccttccacagcctggaagaccgcagggtcaagcagttcttcgacctccggagccgtccggaaatagaccgcccggaatggccggcaccccgtcccaacccggattactgcttccgcccgctttcccgcaaacccgtcactgcgggagaagaagaactttcaaccaacccccgttcccgcagcgccaagttgcgcggcgtggaaaaaatcatctgaccatctctcttccgccaccgccatgaaaagattcaaacagcgtttcaccggccaccagatcagcgtgagcatgatcatgtggctcattgccttcgccgccctcacctgcggagcgggcatcacttatgccgtgctgaaaaacgaccagatccaggtcgcgcgcgacatcaagcaaatgaacgaagagatcgcctcctgcgaactcacaaaggaatattaccgttccaagacttcctccctgaccagccgctgggccatccgcgacaggctggcccaggacaagtccaacctgcagcctatcgagccctcagccgtagaatacatttcttccgaaaacgcctcccgcatcgctgcggcaggccattaactgcgttgagccgttcatgatcacgatcacgaagtccagatttgccagaagaagcctcgtcctgtgcggcctggcgggcgcggcggtcatctggctgatgttgtcgctggtcaatctccagctggtttccccccggaaaacgagcggcgtttccagcggcggcattattgaacgggaggttcttttgccccagcgcggccgcatcatggacgccaatgaggaaatcctcaccagcaacatgcagagctccgagctgattgcggacggctatcatctgaacgaccccaagaccatcagctgggctctggcctattccaaggccgtccattccccgttctgggagaaagccgcaacggataaggaaaaggaaaagctcgtttccggcttccgtagcaagattctgggccaggccgccagcaaaaaggacggcagcaaggaacataatctggcgaaaatcctgctggaagagcctgaagacggaccggaaggggtagatatggccagaaaaaagctggaagagctttatgagccggagatggtgaaagaatacgtgcaggcgcacctggaatacgccgccaaagtgattgcccctttcctgccggacatgagcgtgcaggacatcatcaacacggtggaaaaagacggggcgattcccaagaagcgcatcgtcattgccaaaaacctgtccgaggaaaaagcggaactgctgcggcaggctatccagaacgcccgcgtccaggggttccgttttgagacctcctccaaacgcgtctattccgtgccggaatgcatggtgcatattctgggctacatcgcccagacgaaggacagcggcccccggcccatagccctttccggccttgaaaagcagctggacgaccagctgctgggccacaacggcatcagggaataccggaaagacagccgcgggcgcatcattccctccgcggattcccgcttcaaggatgccgtggacgggctgaacgtgcgcctgacggtaaacatggaataccagacgatcgtggaggaggagctggacgccgccatctctttttacacggatcagacccacaaaccccgcggctgcattattgtggtggaacccaagaccggcagcattctggcgatggccagccggccccactataatttaaatacgcgcgagggccttcaggaaggcgcctaccatttcgccgtgcagtccctgtacgaacccggttccacttttaaaatagtttccgtcacatccgccgtggacagcggaaaggccacgttcgacaccatgatcaactgcaccccttatccggtgcccggttcccgccccgtcacggacgccccccgttcctatggcggcctgaccgtagcgggcgtgctgaaaaaatccagcaacccgggcgccttccgcattgcactgaaatcgggttggcccacgtataaaaaatactttgacctgtacggattttcctccaaaacgggtatcgacctgccgggggaaaccaacagccagtgccaggacggcagcaattttgtcaacttttcccgcatcagcttcggctactccctgatggtgtcccccctgcaggtcgccatggcttatgccgccatagccaatgacggcgtgcgcatgcgcccccggctggttgacggcatttatgtggatgacaggaacttccagccttccccccccgtggaggtatgccgggtcatgagcgtcaagacggcccgggaccttcggaacgccctgttccacgttacggatctggacgggaccgccaaaagagcgcgggttgaaggctataacgtgggaggcaaaaccggaaccgcccacaaggtgaagcctacaggcggctattttgaaaaccgctacaccgtctcctttgtaggaatgctcccggtggaggacccggccttcgtctgccttgtcgtcattgacgaccccacttccaagcattgccatcccggaggcggaaccgtatgcgccccggtcttccagaaactggccacccgcctggcggccgccatgaacattcctaagaacgtcccttccgcagaggcaaataaaaaagcctcccgtgcccaggcctcttccacctcatccaaaccgccgcgcagataatcccgtcatgaagctacttaccttactcaaagaccttccctcccatacgctcaccggctccccccaggtgaaaatctcccatctggaatgcgacagccggcgcattctgcccggttcctgctacattgccctgaagggaacccgggcggacggccatgaattcatcccggaggccattcgccgcggagcctgcgccgtcgtcgcggaaatgccctgcacgcaggaagccagggaagccggagtcagctgggtggaggtgaacgactcccgcctggccgtcagcctgatgggcgcggcctggaacggacgcccttcccgccacatgaccatgatcggcgtgacggggacgaacggaaaaaccacaacggcctacatcgcccattccctgctcaagcagtcctggctgcgcgctggattgatcggcaccatcgcctatgacaacggggaggaaatcactccttccacccataccacgcccggaccgctggaactggaacacctgctgaaggaaatgtatgaaaacggctgccgcggcgtctccatggaggtctcttcccacgcgctggaccaggaacgcgtggccggcatcaatttcaacgtgggcattttcaccaatctgacccaggaccacctggactaccatcacaccatggagaattatttccaggccaaggcgaaattgttcgaacagatggcacaggacaccaaatcccggcgaaaacccgtggccgtcatcaacatcgacgacgcttacggccgccgactggcggaaatgttttccggccgcatgaccgtaaagacctacgggtccgccctgggggcggatttccgcatgctggtgcaccacgccaccgccaaaggcagcgagtacgaattggaatacaaggggaaaagctacctggtccgtgtccccctgatcggcaagttcaacatgtacaacagcctggccgcgctggccgccgtcatttgcgccggcatccccgtgcgggacgccattgcgaaccttcagaatattccgcaggtccccggcaggctggaactgttcacccaccccggaggcgcccagattttcattgactacgcccacacgccggacgccctggaaaacgtctgcaagacgctcaaggaactgtgctcccgccgcctgattaccgtgttcggctgcggtggggaccgggacaggggaaaacgccccctgatgggagccgctgccgcgcgcctgtcagacgcctgcatcgtcacctccgacaatcccagaagcgaggaacccctctccatcatcagccagattgcggcgggcatgccggaaggcagatacgccatcatcccggaccgggccagagccattgccacggccatcgagcaggcccgtctgggggacatcgtcctcattgcgggcaagggccatgaaaattaccaggaactttccaccggccgcattgatttcagcgatgccaaggaagtgcgccgcaacatgttcatcaaggaacgggaagaattcccccaggcataacacgttattccgtctttctttcatgatttccctcacggcacacggcatcagcaacgtcatcggcggaaaactggtcagcggccccttcgacagggtcgcttccggcggcgtgtgcacggacagccgccatttgccgccccatgccgttttcttcgcgctggggggagaaaaatttgacggaaacctgtttgccccggaggcatcccgtactgcggccgccgtcgtcgtcagccgtgtggaggaaggcatggagccctcctgcgccgtcattctggtggaagacacgctggaagcccttcagaagctggcctcctggtggcgttcagagcttaccctcaccgtcatcggcctgaccggctccaacggaaaaacctctaccaaggatctgacggcctccgttctttcacaggggttccgcaccatcgccacgcagggcaacctgaacaaccacatcggcgtccccctcagcatcctccgggccaccccgtccgacgaagccgccgtatgggaaatgggcatgaaccactccggggaactggctcccctgtgtgaaatgacgcgcccgaaaatcggcatcatcaccagcatcggcacctcccacatggaatatctgggttcgcgggaaaacatcgcccgggaaaaatgcacgttggcacgctgcctgccggaagacggcttcatgatttttccggcggactgcgattatgcggatatgatccgtcaatccacccgcgccgcctgtattgactgcggcattggcgccggaaccgttcgcgcggaaaatcccgtctctaccgagaacgggacacgcttcatcctttccatcccggatttctgccgggaagaggtggaattgcccgtccacggccggcacatggtaaccaatgcgcttctggccgccgccgccggctgggcggcaggtcttgcgaaagagcaaatcgcctccggcctcaatcaggcgcggctcacgggcggcaggcttcactgcacccggatcaacggcattctggtagtggatgacacctacaatgccaacccggattccatgcaggccgccctgcataccgtagcggggctttcctgcaccggcagacgctttgcggtgctgggcagaatgggggaactgggcgcgttttccgaggaagggcacgttctggtgggccgcacggcggaagagctccgtcttgactgcgtcgtcagcgtgggaacggatgccgcccggattacggacgctatttctccgaacgccttcactcaaagcctgcatttcggctctgcggaggaagcggcagaatggctccgcagccatacgacgccgggagacatcgtcctcttcaaaggcagccgcctcgcccggatggagcaagtcatgaacctcacctttccgccacagtaaattttatgcattccgttattgaacagttcagcccctcgggggcatttgcagaaccggcagggagggccctcctggcctgcctggtttcctttgccctgaccatgatattcgccccgcgggtcatccgggcgctgatttccctgaaaatcggccagcccatcaggacggcagaagaggtgcacaagctggcggaactccacggggccaaggcgggaacgcccaccatgggcggcgtgctgatcgtaggatctatgacggcggctaccctgttgtgcgccagaatgggcaatccctttatcattgcctgcctgatcgtcaccctggcgctgggcctgctgggattccgggacgattacctgaaggtggcgaaaaaaacctcggacggcatttccgcacgtaaaaaactcctcgtccagttcctggccggcctggccggcgtcaccttcctgtacctgtacccggaaggcagtccccgcgtggaacttcacgactacatatcctccctgttcattccgttctatggccaggtgaacctgccatggttcgtttatattcctttcggcgtcgtggtggtcatgtccgcctccaatgcggtgaacctgacagacggcctggacggcctcgcctccggctgctccgtcgccacgggcattacttacgccatcattgccgtcctctgcggaagctggctgacggctgattccctggatattcccttccaccccggcgcgggagaaatcagcgtcttcatgatggccctggtaggggcctgtctgggcttcctgtggcacaattgctacccggccagggtatttatgggagacaccggctccctggccctgggcggagcgttcggcatggctgccgtctgcacggcgcaggagcttctctttatcgtcatcgggggcgtcttcgtcatggaggccgcgtccgtcgtgctgcaggtaggcagctacaagctgcgccacggcaaacgcatcttcgccatggctcccatccaccaccattttgaactcaaaggctggaaggaaacgcaggtgattgcccgcttctggatgatcagcctcctgctggctttcctgggcctttttctgattaccaccgcctgacaaaccacgaacatgcagctcaataacctcaacatcgccgttctgggagcgggaagaagcggacgcgccgcggcgcgcctcgccataaagcatggcgcacgggtatgcgtgtttgacgcttcctcctccattgacggatggccggaagacattcccctgcataccgccgccacagaggaagacggacgcgcctttcatgcggatatggtggtcatctcccccggcattgagacggatagcccctttgtcaaatcctttggacgggaaggcgtggaaaccatcggtgaaatggagctggcatgccgcttttaccatggccgcatcatcgccatcaccggaaccaacggcaaaaccaccaccacatccctggtggaaaagattttgctgcgcgccggaaagaccgccgttgcctgcggcaattacggcgtgccggtagcggaaatcctgctccgggattccgtgccggacgtgctggcactggaggtcagctccttccagttggaaaccatccgcgattttcacccggatgtggccgtatggctcaattttgcgccggaccacatggaccgctacaaatccgtggaggattaccaccgcgccaaactccatatcttcgacaaccagacggaaaaagacctggccgtcgttcgctccggggaacggcttccgcacctgaaagcctccgtgctcaccttcagcccggaagatccggcggctgatctttattaccgcgaaccgttgatcctggagggcggcgctcccctgctgaacctggaagggaccgccctgaaccagcgccataatgcggaaaacgccatggccgccgtcctggcatgccgccacctgggcattcccgcagaaacagccgcagaagtactgaaggagttcgcgccccccggccaccgctgcgaaaccgtccgcacactggacggcgtgctgtggctgaacgattccaaagccacgaatctgcatgcgctggaagcggctctgaaatcacaacattcccccgtcatcctgattgccggaggcaaggacaaggggctggattacgtacccctgcggcccatgctgaaagaaaaagtgcacgcctgcgtggtattcggccagattgcggaccagctccagcacgctttttcccccgcggtccccacggaaaaagccgcagatgtagaggcctgcgtggcgaaggcacgctctctcgcccggccgggagacaccgtcctgttctctcccggcacttcttcctttgacatgttcaccggttatgttcagcgcggccaggccttcagggacgcggtgaacgcccttccccccctttcctgacaattcaccagaaaacgaccatcatgaaaacgaccaagacacctgatcacaatccgaccggacgcacccgtccgaaacgcaaaatgggcaccgtactccgcgccaaactcagcaaataccgcgcccgcgtctccgaatttgaagatgacgcgcccagcagcaccgtcgtgcgctggctcgtcgtccttcttcttcttcaccttctcgtcatcggcggcgtttacgtccgcagcacctggttcagaaacacggcggaaaccgtagaaatggcagccgccctgcccgcgccgcccaccgtcccgcagcgccccgctcccgcagcgcccccggccgctctgccccaggttccccaggccccccccgcagccccggtcaccatcacgcagccggaacaggtagtggacgctcgccccaacaggcagccggcccctgcggtggaggaacacattccggatgcagccccggtggcaggtcctgcgcgccacatcgtgcgcacgggagatacctgggaacgcgtcgcgcgtgacaaccaggtggccgtcaatgacctgaaagctgtcaatcccaaagttcagcgccttgtcagcggaagcacgctcgtcattccggcccggccaggagacaaatttgaaccggaaaagtccaccgcggaggaattggagccggaaggcgtgccccacattgtgaagaaaggggaaaccctctccgtaatcgcccgcaaatacaaaatgaactggcgtacccttcagaaattcaacaagatgaatgaccgggacgtagcgcgtctcaaaatcgggcaaaaaatcatgatccccaaaaagtaggcctcttcctgcccttccgccgccatgtcttccaaagtctgcatgattctggtctggtttttcgtcatctgccttctggtcgtaggcctggtgatggtatccagcacggcggcgtgggcggaggaaaccaagcacccgtacgaacccctgttcaagcagaccgcctttgcctgcgccggtctggtgggggccatgattctctcccggatagactaccggatatggaggaagtatatctggtggatccttgggggggcctgttttctgctggtgctgtgctatgtgcccggcatcggaaaggaaatcaacggggaacgccgctggatcaccatcggcatgcagttccagcccagcgaatgcgccaaactctgcatgatgatggccctggccaactggctggccctgtaccgggaccgcaccacctctttctggtggggttttgtgatgcccggccttatcttcggcattcctcttgccctgattctttttgaaaaggacatgggcacctccgtagccctggccctggccgcgttctgcgtcatgtttgtggccggaacgcgcaaaatttacctgggcggggctttcgccctggccggaacggccctgtacgttctggtgcagagcaacgccaaccgcctggaacgtttcctggcctggaaagacctggacgcccaccgcctgggcgccggcctccagcagtaccgtgcttccatcgccctgtcccgaggggggctggacggggtgggcctgggaaacagcgcggaaaaacacggcacgcttcccttcgcccacacggacttcattttcgcgccgctgggagaggaattcggtttttacgggaccatgttcgtcctgctctgctatttcctgatgacgtatgccggcatcggcgtggccatgcagtgccgggacacctacggacggttcctggccgtggggattgtcgccatcattttctgtcccgccatcctgaacatcgccgtggtaaccaacgccgtgcccaattccggtctgccgctgcccttcatcagcttcgggggcaccaacctggtctttacgctggccgccctgggcatgctcaccagcatccagaggttttccaccggcgcccagcccaattgtgaaatcacccgcaaagacgaacgctccattgacgtaagattatgactgaaccctctctcaaacatccctccctgaacatcgtgatcgcctgcggcggcacgggggggcacctttttcccggcatagccgtagcccaggaacttaaaaagcgcggtcaccgcgtcacgctcctcatctcccagaagaaagtggacgcccaggccagcaaaagttacggggatcttgacttccgcaccattgaggccatcgcgatgcccaaaatcccatccctgtccctgctggggttcggcgtcaggctgtacaaagccatccgtttcagccgccatcttctggacgaggtggaagcggacgtcgtcatcggcatgggaggattcacttcattccctcccgtttacgccgcccaccgcaaaggaatccgcacctacgtgcacgattccaacgcactgcccggaaaggccaaccgcatgaccgccaaatgctgcacgaacgtgctgctgggcattgaggaagccaggcactacttcaatcccgccaaatgcattgtcaccggcactccagtacgccaggaaatggtggcacggaaagacaaaaacgaagccaggacggagctcaacctgccccaggaccgccgcgtggccctggtaatgggcggttcccagggggccaggaatttgaattccctggtcattgaagccgcccggcaatgcgcagacctgtgcgactttctcatcatcaccggctccgcggactttgcgcgcgtcagccagctgacggcggacatgccccacgtgcacgtcattgaattctgttccgccatggctgccgcttatgccgcagcggatgtggtcatttcccgttccggggcgtccagccttacggaactggcccatatggggaaggccgccctgctggttccctaccccttcgccgcagacgatcaccaggcacacaacgcacgcgttttcgcggcccacggcgcggcgcgcatgatgcgtgaaaacaccctcacgccggacgatattgcggctttcctgaatgaagtactcaaggattcctccctgctggcctccatgaatgaatgtgctttacgtctggacatgcctgatgcagtatcccgcatcgccaatgtcattgaacatacggaccatgcagcctcccatgattgaaaccttacgcaaaagactgacagacagggaacacccggcacgcctacatctcatcggggtagccgggtcaggcatgtccggcctggcgctcatgctgatggaaatggggcaccgggtgagcggctgcgaccgggtgaccagcgcggagaccgaacggcttcaaagcctggggctgtctttctcctgcccgcattccgcagacgccgtttccgatgcggaaattgtcatttattccagtgccatccgggcggacaatccggccctggcggcagcgcgcaagctgaatattccctgcatgcgccgcgcggaatgcctggcagccatcctgaacgggaagaaaggggtcgtggtctccggtacgcatggaaaaaccactacttcagccctctgcgcgcacctgatgagggaaggccgcatgcgtccgtgccactatgtgggggcggaaatccccgtgctgggaaccaacgcccactggaatgaagacagcaaatacctggtggcggaaggggatgaaagcgacggcacgctggtaaattacattccggagcacagcatcgtcctcaacattgaaccggaacacctggactactacaaggatctggatgaaatcaaggccgtgttcgaccggctttgttcccagacgcgcggcaagattatttattgccgcgcgcatcccggcgctgaggatgtctgcgccaagtaccccaattccgtttcctacggctgatccgatgcggactacaccgctacggacgtgctggaacgccgcggacgcaccctgttcaccgtgttgaaggggaaagaggaactgggccgcgtggagctgggcatacccgggcgccacaatgtcctgaattccctggccgcgattgctctggcaacggaactgggcgtggatttcccggcggtgacgcggggcctggcctcctttgcgggagccaaacggcgctttgaaaccaaatacctttcctcttccatccggattgtggacgactacggccaccacccaacggaaatagccgccacgctccaaactgcccgttccctccagccgaaccgcctggtagtttacttccagccgcaccgctacacgcgcacacagcttctggcggatgacttcggcaaggtgctccaggaggcggacctcgtttttgtagcggacgtgtatcccgccagcgaactgcccattgaaggggtaagcgggcagacgatcatcaacgccatgcacaggcacggccccgtggaaacccgttaccttcccgacctgggcatagcccaccacaccatcggcaacgcgctgaaacccggagacctgttcctgacgctgggagccgggaacgtccatgaatgcggcatgcgcatcgcgcgcgacctggccctgctggaggatctggaacgcactgcgggcggttctctggaaggcaagctgtacgaacccatgtcacgccataccaccatgggagtaggcggctgcgcccagtactggctggagccttccaccttttccggaatgcaggcggccgtcaactattgccgggacaggaatatccccgtacacgtcattggccgcggttccaacatcattgtcagggacggcggactgcgcggcgccgtcatccacccttccgggggagaattcgatgtgctggaaatccaggggaaccgcctcaccgccggagcgggcgtgcggttgaaaaaactggtttccaccgccgtccagaacggccttggcggcctggaatggatggacggcattcccggcaatgtgggaggaagcctccgcatgaacgccggagccatgggcatggatatggtcaaaaacctcgtttccgtcacctgtctggatgaagacggggaaatccgcagccatacaagggaagaattgaacgcccagtaccgttccattccggacctagtgcacaattttgtgcttcaggccgtgtttgaggcgcagcccgcccctgcggaagaaatggagcgtcttctggaggcggcacgggccaggcggaagctttcccagcccgtcggagccagcgccggctgcatcttcaaaaacccgccggaaatcccggcaggcaggctcattgatgaactggggctgaaaggcgcctgcgtgggagacgcctgcgtatcagacgtgcacgccaattttatcatcaaccggggtcatgccagagcgagggacatcaccatcctgatcgacatgatccgcaaggaggccatggaaaaccgcggcatcgacctgaaatcggaagcccaggtcatcggagaccgggacccccagttttaacccattcattatttattccaatatgaacactctcaagcgcgacctcaaaatcgccctcctgctcggaggtcccggggcagaacgggaagtatcccttgtttccggcaactccgtttacgacgccctgtgccgggccggattcaccgatgtaacgaaggtggacgtgcacggcccggatttccggctgccggaaggcacggagctggcctacaacattatccacggcactttcggtgaggatggaaccctccaggccattctggaagaacgcggcgttccgtacacaggggccggctcccgttccagcgccctgtgcttcaacaagtcagaatccaaaaaagtttttctggaagccggagttcctacgccgcatgcggaaattctggactgttccaatggcatcgtgatgccgtccctccccctgcccttcgtcatcaagcctccctgcgagggttccagcgtgggcgtccacatcgtccgcaggcaggaggatgtgctccccgccatggaggaagccgtaacccacggaaccaccgtattggtggaagagttcattcaaggcaaggaactgacggtcggcattctggacgggaaagcccttcccgttattcatatctgcccccgttccggcttctatgacctgagcaacaaatacccgtggatgaatatgggcggcggtacggattatatttgcccggcagaccttccggaagaaaccgccgccaacgtgcaggaggcggccctgaaagcttacaaggccgccggcgtggaagtgtacggccgcgtggacgtactgctgcgcgaggaagacggcgcccccttcgtgctggaaatcaacaccattcccggcatgaccccttccagcctgcttcccaaggcggcggcggcctccggatggccctatgaagacctctgcgaaaaaatagcggaattatcgctagccaccccccgtaaataacgtaatatttgacagagggcggggagtcgcccctcccgcaccccccgatgtcgcacaaagccacaacgccagtcccccgttccgccaaaaggccggaaatgcttcttctggaacgggaggccagaaaagagaccatcgaacgcaagggcaaaaactaccgtttttggctcttccggcgcaagctgtaccacattgtcaccgtttacgcgcttattttcggcttaatcggggctatcgtttttctctggaaagattacatcctcaaatacgactggctttccatcgacactgtcaccctgaaaagcaacggcattttcaactccgaacaggccttttccgttatgggcatagggccgcaggacaacattttttccatagacgccgcagagctggagcagcgcctgaaaaaatgtcccgccatccgccgggcttccgtcaaacgacagatatcctccaaccccacgctgctggtggacattgacgcgcgcatccccgtggcctggattgactgcccggaactgggaattcacccgggagatgccacatacggcgctttggcagacaaggaaggcgtcatcttcccctgcatggagcaggtccacacgccttatatccgggaaaagcgcatgccctccgtcacgctcaggccgcccagttccggcaaactcagctacggcgtcagcatccgggaactggaagcgcccatgaaactgattgaactgctttccggcacggtaacggaataccttcccagcatcgtctccataacgacgcccaacgactggtctttctgtgtgcgttttaccaatgactgccaggctactttcagccattacggcctggaacaccaggtggaaaaactgtcccgcgccctccggcacgcacgccagacgcaccgcaaaatcagttccatcaacctgattccggagcacaacattcccgtcatctttgacgattcctacgaggatattcctcttgcggagccgattgaagaataacgccgcccagacgttctccggaaaagccgtgttcttctccggctccaaacttcttttccggtctcgttccccctgtttcccctaatttcccgccgaacggaacacccggttttcacaagattcttcccatgtcagaattctgttctttgtcaatgaggaatgagtctgcgaagacccacagaacacttgccaataaggctgtcccggttatactgcgctacgatatatgagcaacgaaacacctttatcccccgaagcggaaaaactggcggcagcccgcaagcgcaaccttgacctggccctctcccaaatccagaaagacttcggagaaaacgccattatgcgccttggagacaacgtcaaaatggaagtggacgtcattcccacgggcaaccttctgattgaccgcgctctgggtgtgggcggctttgcccgcggccgcattgtggaaatctacggactggaatcctccggtaaaaccaccctgaccctgacggccatcgcccaggcccagaaatccggaggcctggctgcattcattgacgtggaacacgcactggaccctcagtatgccgcccgcctgggcgtgaacctggacgacctgctggtttcccagccaagttccggtgaagaagccctgcaaatctgcgaggctcttgtccgctccaatgccattgacgtcatcgtggtggactccgtggccgcactggtcaccaagcaggagctggaaggagaaatcggggattccacggtaggagcccaggcccgtttgatgtccgccgccctccgcaagctcaccagcttcatttccaaggcccgtaccgtctgtatcttcaccaaccagatccgtgaaaaaatcggcgtcatgttcggcaatccggaaaccactcccggcggccgcgccctgaaattctacgcctccgtacgtgtggacatccgccgcatcggccagatcaagggcagcgacggcgtcatagccgggaaccgcaccaaaatcaaggtagtcaaaaacaaagtggctcctcccttcacggaatgcgaattcgacatcatgtacaatgaaggcatctcctccgtaggcagcctgctggatctggcaacggaatatgatatcatccagaagcgcggctcctggatcagctataacggcagccagatcgcccagggccgcgacgccgccaaggaagctctcaaatccaacccggagctgtacgcggaaattgaagaacaggtcaaggccaaaatggacgagaagaccgccaaataatcccgcctgatcccgttccttcactgccatttcagggcggctccccttcccgggagccgcttttttctctccggaaacagaagcgcaaaagaatctttcacggaaacttttcccttgtgcgtcatgaaaaatccgttagtctggatgcgatatcgtcctatgtatccgacctctcgcacatcatttgcagccgtgctcggcattgtgggcatgtttctgctgacgttgtccacggctttcggatggaatccggaaatcattaatggagtgcagtatattccgatgtccgaagtgcgcacccattacaaactgaccagggaacgcacggaagggcggcagaaagtttacgaggtgccggaaaagattcaaatccgtatccaggcgcgcagccaggagatgttcatgaacaacatgaagttcgtgctatcctatcctgtggctgaccatccctccaaggggctgatggtttccaatatggacctgcacaaaatcattgacccggttctgcgccccacttacatcgccaaccgccgcagtttcaacacagtagtcattgatcccggccacggcggccatgacagcggcacgcgcaaccgcatcagcagggaagcggacatcaacctttccgtgggcaaaaagctgcgcgaccgcctcaaggccatgggctaccaggtggtcatgacccgtgacacggacaacttcattgcccttcaggaccgcgtccgcattgccaacaggcacaataatgccatcttcatcagcatccacttcaatgacggaggctcttctgcccgcggggtggaaaccttcacgctggcgcccgcgggcacttcctcctccatgtcccgcaatatccgccacgacgccctgcagggcaacgcccaggacagcatgaacattgccctggctacagccgtccaggggcacatgctgaaaggaccgcttgccatcaaggagggcatttccatggttgaccgcggcatcaagcgcgcgcgctattccgtgctgtgcaccatcaagcatcccgccattctggtggaaggcgggttcatgtccaacccgcaggaggccctgctcatcgccacggagcgttatcagaatttcatggcctcttccctggccgccgccgtacaccagtaccgcaccgccctgggccagcaagtgcgcagaacgcgctgagttccctaactgtcccggggcctcccttcagcagcatgaacatcatccgcattcccggcctggcagattatcaggaaaccttgaggctccaggaacaactggtccgggcccatcaggaagacccggacagggaaaacgaactgttgctgctggaacatgccggggtttataccatcgggcgtacacggaaccacgccagcctgcaccccggttccgtgcttccctttcccgttcatgaaataaaccgcggcggccaggccacctaccacggccccggccagctggtcggataccccattacggacctgaaccgctgcggcagggatctgcaccgttacgtcaccaccctggaaaacaccctgattgaaacctgtgcccggttcggcgtgcaggcccgcatccgggaagggctggtaggggtctgggtggaaaaccgtaaaatagcctccatcggcgtcggggtgaaaaagtggatcgccatgcacggcttcgccctcaatataacccggaaatccctgcctcccttccttgctattaccccctgcggcatccagggcgtgcaaatgacctgcctggaggatgaaatgtcctccctcctaccggaaggaaacctgttgaaatgtttcggagacgtttttgcagcactatgggaagaaaaatttaaccggtcttaaggggattcggaacgtgcggagggcatgaaaaccatcctttccttgaaggcggaaaggccccaaaggctggaaagaggcccattcagaccatgaatgcagaggaaatgttcaaaaaaacgccttatgtaagacacagaccgtgtcagcaatacgtccttgcatcttgacgcggttcccgaacggacggatgcttatgtcagttatggggaaaacgcttttccaaaaaatctgggacgctcataccgtcggcatcctgccggatgggagaacgcaaatgttcatcgctacgcacctgctgcatgaagtcacctctccgcaggctttcggaatggtccgggacctgggcctgaccgtgcgccacccggaacgcacctttgccactgtgcaccacatcattcccacagacaaccaggcggaaccgttcgcggacgccacggctgacgccatgatcagggaactgcgccggaactgcgctgaaaacggcatccgctttttcgacctccctaccgggctccagggcatcgtgcatatggtagggccggaactcggcatcactcagccgggcatgactatcgtatgcggagactcccatacggccacccacggagccttcggctccattgccatgggcatcggcaccacgcaggtgcgcgatgtgctggctacgcagaccctggccctcagcccgctcaaggtgcgccgcatcaatgtgaacggaaagctggcccccggcgtgcgcgccaaggatgtagccctgcacatcatcggccttctgggagccaagggcggcctgggcttcgcctacgaatacggaggcgaggtcattgacgccatgagcatggacgaacgcatgaccctctgcaacatgtccattgaaggcgcggcgcgctgcggttacgtgaaccctgaccggaccacggtggaatacatcaaaggacgcctgttcgcccccaccggcgtggactgggacaaggccgtggaacgctggctgggctttgcttccgacgcagatgcggaatatgatgaaatcgtggaaattgacggagcttccattgagcctacattgacatggggcatttctccggaccagaatacgggcatcagcggcagcactcccaacccatccgacgcagcggacgacgatgaacggaagatgatcaatgaagcgctggaatacatgaaattccccgcggacatgcctcttaaggggctgccggttcaagtgtgcttcgtaggttcctgcaccaatgggcgcatttcagacttccgggaagtggccgccctcatcaagggtcgccatgtggcccccggcatcagggcgctggccgttcccggctcccagatgactgcccggcagtgtgaagaggaaggcattgcggacattttccgtgaagccggctttgaatggcgtctggcgggttgctccatgtgcctggccatgaatccggacaagctccagggtgaccagctctgcgccagttcctccaaccggaacttcaagggccggcagggaagtcccaccggacgcaccctgctgatgagcccggccatggtggccgccgctgctctgaccgggaaagtctccgatgcccgcgaagtgttctccctgaattaactttccaattttttcctttatgtctctgacccaattcacctccatcaccggcacctgcgttcccgttccgggaccggacatggacacggaccgcatcatccccgcccgcttccttaaatgcatcacgtttgacgaactggcgggagtcatgttctgggacgaacgcttcgacgaaaacggacaatccaaatcccacccggtggacgatccccgcttcaaaggggcttccatcattttgggcggctccaacttcggctgcggttcctcccgtgagcatgccccgcagacgatcaggcgctccggcatcaaagccgtcattgcggaatctttcgcggaaatctttttcggcaacagcaccggcatcggtttgccctgcgtgtgcgcgtctgccgccgacattgccgctctggcccggcacatttccgatcacccggaaacggaagtgacgattgacctcctgaacatgacagcttcctggaaggaaggctccttccccatccggatgccggcggaagcccgcgaagccctgacccggggccgctgggattccattgcggaactgcttgtcaacatggacgccgtagaaaagaaaaacaaggaactgccccaggtcgcagcctcctgctgattcagcattcacctttttcctccccttctatcccccttccccatatgattttcagaattacagactacgtccactacggcacgctggacaaccgtgaacgcggaaccgtccgccttacgctgcagctcatggggatgccccatccggtaaatatcaccctgcagggggactgcctccaggatctggccggttgcgtggttgatttcaggaatccctctccccagacccttcccgcggaacttacccagatcccggaacatatccagggtgtggcgggagacatgacggccagccgccgcatgcctgtcaaaggcaggaaaaccatggaaaacgccctgtacctggaatggttcaccagccaccatgacatggtgctgctggaaagtacggtcttctccatcaaagtctccctccccgaatggattatggattcctgcgaagagcaggcccagatcatggcgaaccagcagatgctgcggacccaggtaaaggaatggtccagggcctattccaaccaccaggaggacggaagcctgcccgaccaccactgggacaaacgcctgcgggaggcggaagccatcgccatcgcctaccaggaggtattccagaaatacaggctgaaccccagcggagacatccgtgtggcctttgtcatgggctgggatgaagtgctggacaacatcgcccagtcggaagaaacggggacgccctgttcctgcaaaagcaccggcatgctcagcctgtttgacattctcaacgaacaggaggcccgggaagtgcagtcctgcatgtttcatcccctcttccagcaggtgatggagctgacggatctgtgccagcaccggttcagccgggaaatcaacaaagcccagaggaacaggacggggccgccggaacccctgaaccagattttttactgcatccgctacatcaccccgcgcattctttcctgcctccttcaggagaaggaagacgcggcggactactgcaccatggccgcccgcatggccctgtgcgtggaacaaacgcgccagacggtagctgcgctggacagccgcggctaccagatggacggcgaaatagcggaacgtttctcatccctgctggaggaagtcaattccttccaggaaagcctggcaacacaaagccgcaaaagcaacctgtaacaacaaaaccttccctggcaacacaaccttcacctttgcgtatgatacattcccacacctgttttcaagggctgtgcgcagtcctggccggcaccgctctttcccacgcggacgagccggctgtttccatttcggacttcggggtggacaaggtcatgtccggccctgtcgtttccatcaatgaccagtacaagggcgtcgtgaaaattgagatggattccctgactccggattacgctactccgtggaataccggccgctaccaggggggcatcggcaccggctttctgatcggggaaaacgctttcatgacgaacgcccatgtagtcagcaacgcggaacgcatttatatctccatgtacggagattcccgtaaaattcccgccagggtcaaattcatcgcccatgacgcggatcttgctctgctggaggcggacgatcccaggcccttcaaaggaatacggccttttgaattcagcaaaaacctgcctcatctggaagacgaagtaagggtgatcggctaccccatcggcggcaacaggctttccgtcacgcgcggcgtggtctcccgcattgatttcaccacgtacgcccacccccgcaacacggaacacctgaccatccaggtggacgccgccattaacccgggcaacagcggcggccccgtcctgatggggaataaagtcatcggcgtggcattccagggcctgaacaacgccaataacacggggtacgtgattccaacccccgtcatccgccactttctggaagacatcaaggacggtgtctatgacggttacgtggacatgggcattcaggctgcgcccatcctgaacccggccatgcgcaaagcgttcggtctgccggacgacgaaaaaggcgtcctgatcggcaaggtgctcaaggggtcctccgccgacggcgtgctccgcaacggggacctgctgatgaaagtggacggctatgatgtggacagttccgccatgattgaactggacggccagaaaatcagcatgaaagaactcattgagcgctgttttaaagacgaccggctcccgctggatatcattcgcgacggcaaacccatgaaggtggaaatggtgatgaagccatccccctccagagaccttctgatggcggaatacgataaaatgccccgctacgtcgtctttggaggcctggtgttccagcccatccagcgcaacgtgctcgcggcggcggacatctccatgctggacgttgcactggacatccggaattaccaggaagacggcggctgcgtgaaccatgaagacatggtcatcatcaccaaagtgctggatgatgaggtaaacgcgcgtctgtccggctccatttccaattccattgtggaaaaaatcaacggcgtaaaggttaaaggccttacccacgcctacgaactcctttacccggagaacatgccggaatacgtcgtcatcgaactgaaaaacggagagcgccccctcgtctttgaaggcaaggccatggagacggccaacaagcgcatctccaaaacctacaatatcccgaaaaacgcccgcctggacagcgccattcccggccgccagcctggccgcaacactactcccgcccgttaaccgccatgaaaattctttccacttttttcctcggttccctgatgttgctcggcggctgccagccgcgcgaagccggacgaaccactcccgaaccccagcctgaacaacagacggaaacgcctgcggaacaggtggaggaaacgcccgcgccggccccgcttccctcccccaccggctccatggtcggcattaacgccaccaatcagggctatgccatgattcagccgtggagcaaggaaaacccggcgtacagccagggcttcggcatttatctgggagacggcaatatcctgacggcagccaacatcgtttattccgccagcttcgtggaagtgacctccgcggacggctcccagacggttcccgtgaccgtaaccgcctttgacccggaagccaatcttgcccttctgcgtctgaaaaacggaaaagatgccgcttttctggacaaactggtccccgttgcgctggggaaggctccccgcctgggcgacaaggtaaccttctggcaattcaatggcgacggccttcccatcactacctccggaacccttctggcgacggaaagcgcctgcccgttcacgaacggggaaccgttcgtcctgtataacgtcaaatcctccgtcactcccctgaaaggcggcgcaggcaaccccgtcatgaggggcaatgaacttgtgggcctcagcgccagctgcgatccctccgcacagaaagtgctggccgtaacccataccatgatttcccggttcctggaacaggcccgggccggcaattacaccggtttcccggcggacggcacccaggtcacggaactgaccgaccccgtcttccgcaaattcctgggcctgcctgaaactggcggcggcttttacgtggtgaaactgcctgtttacggctccttctacaaagccggagtacgtcctggagacgtggtggaaagcgtcaacggcatccctctggacagcaaaggtttaattaaggatcccgccctgggccccgtttccgccaactttctgttccgagactccgccaagccgggggataccattacgctgggcatccgccgcaagggaaaggacggctccagccagcccatgacgctggacgtcaaactggacaggagcgcccttgaaggggacctggtcaatccggcccccttcatctccaatccgccctaccgcatttacggaggtctggtatttgtcccgctgacgggagccctgatgggagaaatcaacaagctcagcaagaaccatccccccctcaacctggtggaagccactcaaaagaaagaggacatacggaaaaaaggcgtggatgaaatcgtggtcttcctgatggccctgcccacccaggctacactgggatacgcccagatgagcccctccattgtggaaaaagtcaacggcgtgcaggtgaaaagcttcaagcacctcaaccagcttctggaccttcccgctcccggcggcacgcaccgcatcgaagtgacccagcagccgtacaccatgtacatatcccagaaggaagctgccaaagcggactgcttcatccagatgagggccgttcccgtgctccgcagggactaggaatccgcgagccatgttcacttgcagccctcctggcatgtcacttcacacgctgaatatccggcttgattttccctacaggacaggctttacccatggagccttccgcccggaaaacgatgctctggccagcctgatggaacagaggcccggaagccgcgttctcgttctcctagaaaaagggctggaacagttttatcctcagcttccggcaaacattgaccgctattttgaaaaaaatgccggggtgctggcctatgccggctgccgttccgttccgggcggggaggaagccaaaacaggtttttccgcatgggaaacggccctgcgccacattgtggaagcaggcattgaccgccattcctatatcatagccgtgggcggcggagcgtttcttgacgtagcaggctttgccgccgccaccgcccatcgcggcatccggctgttgcgcatccccaccaccaccctctcccaggcagactccggagtaggtgtcaaaaacgggatcaatttcatgggccggaaaaactatctgggcaccttcgccgttgcgtgggccacgcttgacgacttcctgttcctccattcccagcccctccccctgaaaagagccgggctggcggaagtagtgaaagtggcggtggtgaaagacgcctctttcttcaactggctggaaacgaacgcctccgcgctggctgtatgcgaacgggatgctctggaatatgccgtggagcattcagctctgctgcatgcctcgcacattgcatgcggaggagacgcctttgaactgggttccagccgccccctggacttcggacattgggccgcccattacatggaaaccatgtccggctacacactggggcacgcggaggccgtttccgtgggcatgtgcctggacatcctttattccgtccggaaaggatggctacctgccgcggaggcggaaagaatcatctccgtgctgaaaaccctggaactgcccgtattccaccccctgctttcccgcaggacagaaaacggcgcctgcgaagtgctgaaaggtctggaggccttccgcgaacacctcggcggccacctgacggtactgatgcttaccggaataggctggggaaaagacgtccatgagatagacgccgctctgatggaggaatgcatccgggaaatgcaggaagccgccggatattccgttcaggaataacagccctttccttgccgcctccccgtcagaaaacaagcagaagccatctggcgtatcacagagaaataccagccggacggcagtatgaaaaaaacaacgacgtttttccttcccacaatctccatatcctcctgttccggcagttcccgcagggcagcattattatgtgctgccgggcagcccatgatgcaagccattttgcgactcccccttttttcataacgcgccggatttacttctcctttttcaaaaagaagatgaaggaaaaagcatgaacagcctgccggatacctcaaagagaagatcatgccgtcaacaacgcggaggcagtggacacgatgccccgctggaaacaaatccattcatcgtctttgcaaggcacgggaaaaccaaactgccgggaaccgcgttccgttgaaaattcagggaggttcttccggaaaaccgtcccttttaaacctgtgcggataactccgcgggaaacagaactttcccgtattcgtccaaactgacgccgggccatccccatttacagacgcggtacggcggcgagaagcgcctgcgtgtattcgtgggaaggggaagaaaatactttgtccgcctccccgtattccacaatgcggcctttgcgcatcacggcaatgcggtccgcgatgtaatggaccacggacaaatcatgggaaatgaatatcatggtcaggctcaagtcgcgggccagggtaataagaaggttcagaatctgggactggatggaaacgtccagcgcggaaacgggttcatccgcgataaccagcctgggttccggcgccaatgcgcgcgcaatggcgacgcgctggcgctggcctccggaaaattcatggggatacttgcgcatcagggaggggctcagccctaccttttccatcagttccgccacatcatccctcgtctgggcaaaagttcttttacggcggctctgcaacgcctcctttaatgttgcatataccgtaaaacgggggttcagggaagcataagggtcctggaaaaccatctggaaatccggacgacgcttcctgacttcggatgcggaaagagccgtcaactcttccctttccagaaaaatgcggccctccgtaggcttctggagcagcatcaccgtgcgggacagcgtggatttgccgcaaccggattcacccaccagccccaggatttctcccttttccacggacagcgacaccccgtccaccgccactacgggggcagatttgcgggcagagagcagcccctgcaccgcaggaaagacaacgctcacatgatccagttccagaaaagccatgccgccaccctaacaagccttccgatgcaagacaagaccccagccgcgccagttcctccaatatcaggacatccatgcgcacctcccatgccgtttcccccacagaaaaaccaggaccggcaatgaacgccaaccccggctgggcatttcgcatgtcttccggagccacccggaaccagaagggttcatcatcacacacgaggctgataacagcaaaagaggctgttcccccatttccaccatccattggcctttttgaagaactataataccgccaggaaatatcagggaccgcacacaaggaaaaaacacgctccagcccaaaagcgctccaaaaacggctgccaggatgaaggccgcaaccagcagcagggccggagcttttctatcccgcatattttgatgatcccctatccggatttccggatcctccctgaatcaaatttatggataaatccccccatggagccatatcaaacaaaagaaccgttccccgcaaagggaacggttccagagatactctgactcagagcttacgcaccgagctggtagcggacgaaggaggcgacggagatatcgtcgccgagttccttgccggcctggttgaggagggcctccaccgtcatctttccggcagggtccttcacaaatacctggttcagcaggcaggactgggcgtacagagccttcagcttgccgggaagaatcttttccagcaggtgttcgggcttgccttcctgaatgagctgctgcttggcgatttcctgttcctcggccacgaaggcgggatccaggctatcggagctgacgctcttgggagcggcggcggcgatgtgcaaggtcaaatccttggcgagggctttgaacgcatcagacttgacggtttcttccttgccggccttgatggacagcagaacgcccactttgccgcccatgtggatgtaggagaccacggcgccgatgccgtccgccgtcaggcgggcgaatttgcgcagagccatgttttcgccaatggagctgcacatggccttgatatattcttccgtggagccttccgccatggggacctggagagcctcctccagcgtggaggccttggaatccatgagagcgttggcaacgtcattcaccagaccctggaacttgtcccccttggcgcagaagtccgtttcacagttgagttcaaggatgatgccggagcagccgcagggagccacagcggcgcggatcacgccttccttggcgtcacggtcggccttggccgcagccttggcaattcccttctcacgaagatactttacggcggcatccatgtcgccgttgcattcgttgagggctttcttgcaatccatcatgccggcgtccgttttgtcacggagggccttgacgagagctgcagtaatttctgccatagtgtttctgttctttctaaatggttggtttaggcttcggcggatgcgcccttgccttcgttgatggccttgacaatgcagtcaagaatcaggcggatggaacggacggcgtcgtcgttgccgggaatcgggaagtcgatttccttcgggtcggcgttggtatcaaccagaacgcagacgggaatgttcaggcggtgggcctcgcggatggcgatgtcttcatggtcggcgccgatggccaccatggcgtccggagcgccgcccatgttgcggatgccctgaaggttgcgttccagcttctggcgttcgcgatccagagcggccagttccttcttggacatgctcttgaattccgggctcttttcaatcccttccagatagacaaggcgttcaatgctcttgcggattgtgctcatgttggtgagcatgccgcccagccagcggtggttgacatagtactgaccagtggcttccgcagcttcgcggacggcttcctgagcctggcgcttgcagccgacgaagaggattttcttattgcggcgggccagatcagccaggaaggagcaggccttgtccaggcatttttccgtttcctcaaggttgatgatatggataccggccttgtccttgagaaggtactttttcatgctggggtgccatttgcgggtctggtggcccaaatgaacaccggcttcaaccatctggttaatcagatcattaatcatatatgtatgtaggtggctttccttgcggcaggaaaagcagtttttggggacttcgacgctttttacccctccgatccccgttgtttagttgcgccgaatcacgcgagggacgggcaatatacttcccgccccctctcttgtcaaagcataaatcattgatttacgaaactattccgccgttcgcggaaccttgtcgcaagcaagctcatggagaactttgccatttccgcagaatatcttaccgcgcaggcccgtcaaaaccgttcccggcagactctcccatgcccgttttccagtattcccgttccgcttgcaaataaaacgcaccgaacggaggcaggatttttaacgttttcccatgccttgcggccagttccggagagggcatgtcctcccgcatatgcttcccttttccaatcaggaacggcagcactaccaccttttgcccctttaatccgggtaataccttttccacagaaggagatgcgccaaagtatgcaagagccatgtccgttccttccggaagcaggaatttcaactgctggaggaattgcgccggctcaggggcagccccccttcccgttaccccgtgggctaccaccagcagggaagcctccccctccaattccttttgcaaggcggcggccctaaaaccaacaccgccgcatcccgctccccatacgggtttaaaaacaagttccggatgctgcccgctcccggcatacagcgcacgaagcaattccggcaatgtctccgtcaccgtcacgccgctctgcatgaagacagggtaaacccagactacaccatcgcccggaggcaaatccgccgccgtcaggccgcggaaagacgcctgccagacacagtcgcttgaatattgaaactgctccgccacatgctgccgcaattcagcccctgcttcatcataggaaataaagagtttgtaaatcttcctgggcatttcggtaagaccactgcggcggaacggcgttcggaacatcctgtcatttattcatgcggaagtaacgcatgatgaccgtttgtaacaaaaagtccggagggcggcaactccatacgcttttttccaatccatactcccctccatttacacgcacctatctaaaaaatatttaccatatttataacaaaatcattatatcgaatataaaaagatacttccggaaaaataaaccttcgcctccgaatctccgcgcggaggcaggatagcggcttgaccgaaaggcctgaaaccgtcatgatacaaggacatacaggttttgttttatgtcgttttacattcaatccgttgaaatcggcggcccgcggccgttctaccttctgggcccctgctctctggaatgcgaatcctttgtatgggagatggcccgctccatcaaggccatcgcggaaaacctggatgtcccgctgattttcaaagcttcctacgacaaggcgaaccgcacttccgtcacctcttttcgcggccccggcgtgcgggaaggctgccgtattctgtcggaaatcggcagggagctgaaactgcccgtcgttacggatgtgcatacggcccaggaagcggaaattgccgccgaatacgtggatctgctccaggttcccgcttttttgtgccgccagacggatcttctggaagcctgcgccaagagcggccggcccgtgaatatcaaaaaagggcagttcctggctccgtgggataccgtgaacatcggggaaaaaatgcgcgccttcggctgtgacgaattcatgatgtgtgaacgcggcaccacctttggttataacaatctggtggtggacatgcgctccctgtactggatgaagcaggaaggttttcccgtcgtattcgacgccactcacgcagttcagaaacccgggggattgggaggaaccacgggaggagacagcgagctggcccccgtgctggcatccgccgccatggcgacgggcagcattgacggcgtgttcatggaggtgcacaaagacccgtccaaagcgctttccgacggccccaaccaaattcctctccacctgcttgaaggagtgctgaaacgccttcagtccatccaccaggcggttcagtcatgatgaaattattgtccacatgctttttgacggccgccctgtacggcacggaggcgcaagcggacaccagcctgcccgcagccacgccttttgccggcgtagataaaaaattacctatgctggagcttctgcccgtaggccaggtgctcccaaaagtcagcctgtcacgatatgaagggccgcgcctttccatgctgctgacggcttcaagcgtgaccgtggccgccccgcaggaaattgccgcgaatatcctgaacgtgtacttgtacggaaaaaacaaccagacctcccaccttttcacgcaggccgcctcttattttctggataaaaaactggccgtctcccatacggaaaccaccctcagggaagagaatctttccgccaaagggaccggcctttacctggacaccaatatcaagaggggcatcattctgggtcccgttcaaaccaccatccgcatggctcaacgcaacaagtaaccattcctttttatgaaaaaactttcctccctgctgctggccctggccggaagccttgcctgcagcggcgccaacagcgttccctcccacattgtccagcccctgcccagggaactggatccccgcctggaacaacccctcaccccgccttcccatattgtacgccccctgacggaggaagagacagcccggagggaacgggaactggcccctgttccgaccgcaggcttgaaggaagacggggaaaaggcgattcaaacatacagcgcgcaggaaaaaaccgtggacgggcggattcaggaattccgccagcagcaccaggttgccggaaatacccccgccccggctgcggaaacgacttcctcttccgcagcatccggcccggaagaaggcttcctgcaggccaattccccaaaagacctgtacaccgtagattgtgacggagacttgtacttcgatatggaagaaggcgttctggtgttcatgaaaaatgtccgggtgcgtaaccccggcctttccatggattgtgcggatcatctgaaaatttatgcggaattcgtgccgaagaaaccgggtgacaaaaaaccctccgacgtcaagaaggaaaaggggaaagaagaaaatcagactcaggtggctcttcccaacggaggcaatttcgactacaattccattaaaacggttgcggcttccggaaatgtgaaggccagttacaccaacaaacagggagaaacaagcaacgcccaggctgaaaaaatcacctacaacgccaaaaccggagaaatcatcctgacgggtgccccggtcatcgtcactccggacgtcatcgtgaaaaatccgaacaaggatgctttcattcgggtgtactccaacggaaacatgtacggcagccgcggaaccaagactacgttccgccacgtagacaaaaaactttccgaccgggaaaaccagaaaaccagccgcaaaccgtgagttcgttccactcttctcctttgctaagcgccgaaggcatctgcaaaacctacaaaacgcggaccgttgtgcatcaggtcagcctgaaggtagggcatggcgaaattgtgggcctgctgggaccgaacggtgccggaaaaaccacttccttttacatggtagcgggtctcgtacgcccggatgaaggccgcgtgatttttgcggacgaagatattacggaattgccgatgaacctgcgcgccaggcgcggcatgggttatctgccgcaggaagaatctattttccgcaagctttccgtggaggataatcttctggccattcttcagacccgcaaagacatgacttcccgccagcaaaaggaccgcgccgtagagctgatggaccgcttcggcatcaccaagctgcgccgctccatggccatccagctttccggcggcgaaaagagaaggctgaccatcgcccgcgccctggctaccagccccaaactgctgatgctggacgaaccgttcagcggcgtggatcccatcgccgtttcagacattcagaaaatcgttatggaactgcgcgatacggacggcctttccatcctgattacggaccataatgtgcgggaaaccctccacatcgtggatcgcgcctacattttgtttgaagggaaggtgatcaagcacggtacttccgaggaaatcgccaacgaccccatcgcccgcaagcagtatctgggcgaccagttccgcatgtaactttattttccgtctttcccatgtcctctccgcagaatacgatcgccctggttttcgactacgaccagaccctgagtcccttctacatgcaggatcaggccatcttcccggaattcggcatttctccgcaggaattctggaccaggtgcaacgccaccggagaaagagaaggctgggacggagaactgatttacatgaaaagcctgctggacgccctttccctggaccgcgtcagcaacgcccggcttacccagcttggagagcgcctcaccttttaccccggtttgccggacttttttaacgcgttcccgtccatgaccctctcctcccttcatacggatctgggcatcagcattgaatactatatcatctcctccggtttgaaagccctgattgacggttccgccctgcgcccttatttcaaggccgtattcggatgcgaattcagcgaggagaacggctacatcaattttcccaagagagtcatttcccacaccacgaaaacccagtaccttttccgcatcaacaagggaatgctggattacgaccaggacgtaaacgaccacatgccggaagacatgcgccccattcctttcgccaacatgatttacatcggcgacggccctacggacgttccctgcttcaccgtcatgcgccggaacggaggccacgccgtagccgtatataatccggaagatgaaaccggccgcagtttccgcaaatgctataatctggcctccaattccgaccgcgtgaatttcatcgccccggcggattacacgcccggcagccatctcacccgcctgctgtccggcatggtcacggatatcgccaacggcattgtgcgccgccgggaccgggctctggcggattcctgtattgcggctccttccttttccaaataaaacccgctccattcctctccccgtcatgaacagccatttccactttctcggcatctgcggcaccgccatgggcgcggtagccgccgccatggcccgccgcggctttaccgtcaccggttccgacgccaacgtctatccccctatgtccacttttctggaggaggaaggcatcacgctgtttgaaggctacaaggcctccaacatcccgccggatgcggacgtcatcgtcatcggcaatgccatgagccgcggcaatgaggaagtggaagccgtgctccaacggcgcctgcgttacctttccctcccggagacgatgaaggaatacttcctgcgcggcaagcgcaactatgtggtaacaggcacccacggaaaaaccaccaccacatccatgctggcgtggctgatggaggattccgggctgaaccccagtttcatgattggcggcattgcccgcaatctcggacgcgggggccgttttacggattccgatttttccgtgctggagggggacgagtacgacacggcgtttttcgacaagcgttccaaattcctgcactacctcccggaactggtggtcatcaacaacattgaatttgatcacgcggatatttacaattccctggaggaaatcaaactgagcttccgccggctgacccagatcatcccccgcaacggcctggccctggtcaacgcggacgatcccaactgcctggacgtggttaagggggccccgtgccccgtcaagacggtgggctcttccgactcttccaacatccgcatcctggatgtggagacctccacggacggcagccatttcacactggaaggaacccggtactacgtaccgatgattggagagttcaacatccgcaacgccgccatggcaattgcagccgcacaatttgcgggactgaacgtcaagcagctggcggattccatgagccgctttgaaggcgtggcccgccgccaggaagtcaagggggtagtcaacggcatttccgtagtggacgacttcgcccaccacccaacagccatcaaacaggccatcctgggcctgcgccagcgctatccggaatcacgcatctgggccattttcgaaccgcgctccaacaccacacgcaggaatatcttccagaatgaactggcgttgtccctcgctacggcggatttccctgtggtagccgccgtggatcatccggacaaggtggctctggaggaacgcctggacctcaccaaactttccaacgacctttccgcgctgggcaaggacgctctgattggcggccatgcccaggaaatcgtctctgccgtctgcaagaaagcccagccgggagacgttattctggtaatgagcaacggcggttttgaaggcattcacgccaaattgctggaagcactgaacgcctgacccttcttcatacatccacttccaatgaaaaacgcatccaccatcaccgccttcatcatcagcttcctggtcgtaggcagcctggccctggttttcctgttccttgacaataaggaagaggaacccgccgccgctgaaccggcggcgcaaacggaagtgccggcacgccagacggtaacgccccaacccaccgtcgacccgcttaccaaggaagatatcagccggcagacggctacgccgccctccctgatcaatctcagctccccccagacactggcgcaggcaattgccaaagtcattcaggatcgggatgaggacatcctgaaatccctggaaatccagcaggccgtgacagagaaccagagccgcctcatccgggagctcatggaagcccgccatatacgcctttcctctcccggcatcaccagcatcggcgcgaacaaccagggggccaatcccacagccagatacacgctcaatttcagcagcggcgcgcgcggctacctggatatgaagcgcaatgacaagcaacagtggacgctggataccctcactctgcccagcaagcaggatctggccaaggacaaagtcgcccccatggcgatgaatgaccccatgggcatcgtcagttccttcatggatgccgtcgccaaggcggatttccgcggggcgaggaagttcgtggacggaactaaagtgcaggatgccacggtagccggtttgtgcattctgtttgaggagggggctttccggctccgggaggacgctcccatcaaaaccgcctacgaagcgcccaccaatgcggggtttttcgttcatcttcaggacgcccagggcaggaaggccggcaatgtaggcctgaccgtggccaaaacggacggacaatggctggttgcggaagcttccctggacagcatgctggaagcctatacgaaacggcagggggccggagacgacatctttatccccattgtaaaaaatccccagggcggcgattccctggccctgttcttcggctttaatgaagataccctttccaagcgttccgaacgccagctgcaaatcgtagcggaagctatcaagatggacagtggcaagaagctggaaatcagcggccatacggatgacgtggggagcgaacgctacaaccaggggctctccgaacgccgtgcggccgccgtgaaagtccagctcgtccagttcggcgttcctgcggaaagaatcgttaccaagggattcggcaaatctcagccgcgccgaacctactcccccacggcagacgaagaaacaagggatgaagcccgcaaggaaaaccgccgcgcggaaatgtacctggacttttaaaagagtcatcagagagcagagaagggacaagcctttccaacttctctatttactgttgcctgtcaattattaaccatattccatggctcgccgatatgtcatcaggcaggatgccgcgccggtcgcccccatctccgggatcgactaccgtacggccctcaatgaagaacagtacgccgccgtttcttcagaaccggggccggctcttgtcatcgcaggagccggatcgggaaaaacgcgcacgctgacttatcgcgtggcctggcttctggatcacggtacggacccatggaacattctgctgcttaccttcaccaataaggcggcgcgggaaatgacggaacgggtgcgttccctgattcccctggacttgtcccgcctgtggagcggcacgttccattccattgccaaccgcatcctgcgccagcatgcggaatacctgggatatacaccgacttttacaatcatggactccgacgaccgcaaatccatgattaaaagcgtggtcaaatccctcaaactggatgagaaatccacccgcttccccaagccggaagttctttcatccctgttcagtctggcagacaacgagggagccaatatccgggaaacgcaggaaaacgcctatccctacctttccaaccacctggacgccatcctggaggtgcatgaccaatacgtagcccgcaagcaggaaaccaacagcatggactttgacgacctgcttctcaacgtcgtgaggctttttcaggaacaggagcaccttcgtgccctgtacggttcccgcttccagcatattctggtggatgagtaccaggacaccaattacctccagagccgcctcatcgacatgctggcccgggaacacggccagctgatggtggtgggggacgatgcccagagcatctactcctggcgcggagcggacatggaaaacatcctcagcttcactacccgctatccggcggcaaagactttcaagatagaaaccaattaccgcagtgtgccggaaattctggaactttccaacgcggctatcgccgccaacgaagttcaaattgaaaaacagctccgctccgtgcggcccaccggagaaatgcctcccgccctcgtcccgctcaacgacgaccggatgcaggccaaatttgtcgtccagcgtatcagggatctcattgaagaaggcacggaccccagtgaaatagccgtgctttaccgcgcccacttccacagcatggaattgcaaatggaactgacccgcggagaaatacctttccgcatcaccagcggcatcaggtttttcgagcaggcccatattaaggacgtggtggcatttatgcgttttgtggtcaatcccagggatgaactttccttccgccgcatggtgatgctgctgcccggcatcggccctggcatggcccaaaaactctggatacgctggaccgcctgcccggaaagccggcaagcaacccctccggaatccttttccgccctgatgctggatttcccggttcctgccaaatccagaacggcttggacgcagctttgctacacactggatgaactggcccctgccggaaagctggccggaccggcctccatgctcctttccatcaatgaggccgtgtacgacgagtacatgcaggccgcattcgaaaattacgaccagcgcaggcaggatcttctgcatctggccggattttccgaacgctttgaatccacggaggattttctttcccagctttcccttttgggcaacacggatgatgaaagcgccgcggcgggcttttccggtggctccgtcaccctgtccactatccaccaggccaagggactggaatggtctgtcgtcttcctgatcggcctgtgcgacggcatgtttccgcaccagcgggtcattgatgacggagacctggccgggctagaagaagaacgccgcctcttttatgtaggcattacccgcgccaaggaccagctttacctgacctacccccgctggaactgccgcgcccagggaggaactttcatgcaaatgccctcccgctttctggatgaattcccagccggcctggtggaagagtgggaggtggaataatccagatctcctctcccgggtcatatccgggaaacgccggttctcaatcttctcccgccggacagggaaaacgtggcgcggagtttccgaagggttcttttcccacccgtttgaattcctgcttccaacccttatccggagatatttccgtctttcccggagaacggaattccccgacaaccccggccatattccaaaaaccgtgacaccgcggctcttaccgcatccttccgtttctaccgctgcgattcatcaccgccatatccagcaaagccaatacccacttccgtattttgcttctcaaaacgcttgttgggaagcatcccaaaccctcttttcattcctgctggtttgcaaaattaaatatatagctttctgattttggcgggaaagcgcttagggaaatatttcatatgcgtttttgtaagtaagtatttacggaatatactgaaatccccacttcgtcatttcatagaatacaggcaacaatgcctgccccttttccgtaagagagtattcaacacggggcggtatctcgttgaattgcattctggatacaagcccgtccttttctaattctcgaagggaagaggcaagcatggtatttgtaataccattaatatttttttttaactcaccaaagcggatgggatcttgaataaacaattcataaaggatttgaaatttccatttcccctgcaacataagcagaagtggagtcacaggacaattccccgcttcagtcaaaattccctctttcacttcatgcctgtattcatcgtaggtcatatccttgtgcatgaaaaatgccttcctttctctattagtatagtcaaccgtactgagtcagaataatatgcgtacttgaaaaaatttttatccttagtataattatcttactaatagaagtcaacaagtaaagttaaatatttataatcgttttacaatgaaagaaatcaatataggtcaggcgacggctatcacctctcccaatcctctcgtgttggtttgcaccaaaaaagagaacggtatgctgaacatggctcccgtttcattcttcatgtactcctcgtttaaccctcctatgctggcctttgcaatgggtaaaaccgccaattccggcgaaaatatccgcaagaccggcaaagccgtactcgctgcccctggcgtcagcttgaaagatgcggtcatggcttacggctctaaaaacggcgggcagattgacaaactgaaggaatttccagtcgctctgcaaaacattgacggaacagacattcagatcccggaggacagccctattgcttttgtggcatcgctagctgaaactgtggagtctggcgatcattacctgtatctctgcaatattgacaaaatagtggcggacaaaacaaaagaagccctgttcgcatggaatggttatgccaaagttgcccaggcacaggaaaaataatttgatgccgtcagcggggttttcatggttttctgtgaaagccctgttcttttccaaatatcaaaatctggcgatggggatgatataataaagtgtataattaaaaaaaagcgacacttatgagccagttttctaattttcaaagtagaccggatcacattgaaatccgtggcgcccgtgttcataatctgaaaaatattgatttagatatcccgttgggcaagctggtaggaattacgggggtgtcaggatcaggaaagtcctctttggctttgggcgtactttatgccgaaggttcccgccgctatttagaggcattgtccgcctatactcggcggcgtataatacagatggcagaggcaaaaattgacagtatagaatatgtcccagctgcccttgctcttcgtcaacgtcccgctgttcccggtgtccgcagtacatttggaacggctaccgaacttttgaactcaatccggcttatgttttcccgcttgggaaatcaccgctgtcccaatggacatttgctttcgccatcggtcaacgtcgcggcaatgcgtccccttgtctgctctgtatgcggagcggtatttgacggtctcagcgcagaaagtttttcattcaatggccaaggagcgtgtcacacctgcggaggaactggaattgttcaagcagtagacgaaacaactttagtgcctgacgagtccctttccattgacgaaggagcagttgcgccgtggaattctttgatgtggtcgctgatgactaacgtatgccgggcgatgggcgttcgaaccgatgtacctttttcggagttgacagaacaggaacgggagatcgtctttcatggtccgccagaaaagaaacatatcctttataaagcaaagagcagcaatcaagcgggagaaatggattttacctattataacgctgtttataccgtggaaaatgcccttgctaaagttaaagacgaaaagggaatgaagcgggtagaaaaatttttgaagcggaacacctgcccgaattgcggaggctcccggctcaataagcgggcgttatcaagtctgctatgcggaaaaaaccttgcggaaatcaccaaaatgactttaagcgatttaaccgcttggataaagacgatttctgcttccatgccggaagaactaaaaacaatggcggaaagtatctgcggtcaatttttgcatgtatcaaaacgtctttctgacttaggtctggattatattacccttgaccgggccggaacaacgctttccaccggagagcgtcaacgcgtgcagcttgcaagggctgtacgaaaccgtaccacaggtgttctctatgtgttggatgaaccgtctattggcttacacccagcaaatgtagatgggctgttgggcgttatagatgatcttattgcccatggtaattctgtgatattggtagaccatgatgtgcgagttttaaaggctgctgattggttaattgaaatgggcccaaaagctggagagcatggcggacagatagttgcacagggaacgattaaagcagtagcaaaaaaaacgagttcactcatcgctggatttttggcagacaaggaaaaaccggttatccgagaaacggcaacgccggaggccatgtttgcacatgggcatatcaaactgtctactgctcctttgcatacagtccatgcccttgatttagacatccccaaaggtcggctgattgctgtaacaggagtttccggttccggcaaaacaacactgattttggaaagtcttattcccgccatagaagctgccatagcgaaagcgccgatgcctgaccatgtgaaaagcgtggaggtagccggtattgaacgtataaatcttattgatgcaacacctattggcgtgaatggccgttctaccgttgcaacatacagcgggatattagatgatttgcgccggctttatgcagctatcccggaagcaaaatcaaaagggtataaagtaagtgacttttcctataatactgggtcactccgttgctttggttgtgacggaacaggtcaaattacaatggatgtgcaatttctcccggacgtggatatcatctgcccggactgcggcggctcccgctatgggaaagaagcggaggcaattcgttatcgctctaaaaaagacaaggtgaacgcacccggtatttctctgcctgtactgatggggatgaccgtggagcaggcgttagaacgcttatgtgacatgaaaaaggttaaagaaaagctccaaattctttctgatttaggtttgggttatttaactttaggcgaagcaactcctgccctgtccggcggtgaggcacagcggctaaagctggcggctgaaatggaaaaggcacaggacgacgccatatttgtatttgacgagccaacgattggacttcatccgctggatgtacggatactaattggcgcatttcagaaacttgttgatgccggtgcaacagttatcgtcattgagcatgatttaaacatgattgccaattccgattatgtggtcgatatggggccgggaggcggcaaagcaggaggacaaattgtagcaactggtttgcctaaaaaaatcgctgaaacggctgaaagccttacaggaaaatatctatgtgaaataatttcatagaaacgtaaatctgtgggacgacggtaaaagaaaaagccgtcgtgcaacagcattttgatactcccaaattaaaaaacggcggtctcgggattctcaaagccgccgttttttatcctctctctgaatgtctgaccttcacggttctgcgcatatcaaggctcttttcgtaaaattagcaattgacctctccatatccgcgaaaataactgttttcaagaatttttagaaataatcaaaattgttgctataaaaaataaattgacctggatgttcttgaaattccttcccggctcaaaactgaaaaaacatgtcatgattaaattatttgaagaagaaatataaccaatttatcatgaaccattttaattattattttcattaatttctctcatgtcattccggtgaacgaaccggaatgagaatcatctaaaatctcgggcgccgtgattgtcacgaacgcataaccatctaatcattaaacaaataaaaaagcatgaaattaagactcccacatatgctgctggcggctgttatcgcctgccttggcagtttctccgttgctacggcagctgactatgcagtcaacagtgccgatgaattcgttacggcctggaaccaggctgccgcttccaatgaagcttcaaccatcacgattaccgtaccttccggttccgataatattacgctgacccaagagcaacgagcccagttgaacgccatctccggaacgggcaacgtcaccattcaaatgacggacgccagcaacaaactggttaatttcaattacgatctggttaacaaccaagtcagtttcaacgacgtcaccttgagtgaacctctgggaagcgacaatgacattgtggtgacgaatgcttcaaataccacaactattgatggcaggaatattgccatcgaaggtacgaatgatgctgccaatcccaagacggtgggagccaccgtcacctccacgaacggacaggtaggcatcggcgacaatgtttccatggaaaaagccgttaccgtcaccggccaggcagctcaaaccgtagatccggcaacgccgccgaccggccaagcctataccaagacgacgtacaatacttacaataattccaacgaacaggccgtggtcctgggcaacaacgtcacgatgcaggataccgtaacggcgacaggccaaatcgtaagcgatccggcatccaaggttgcgctgaacggagatgtgacctccacagcgggaatcggaaccgtaactacggaacagtttgacgcctccaacacccagaccggcaaaaccgtcatcgactctatggatgacagcgtctccggcggcatcattcttggagaaaccacagccggggccgtcaccctcaaaactgagggcggcaatatttccctgggagacaattccgtcctggatggcactactgtttccgcagaatccgccgacctgaacaaaaccgtttacagcaatgacggcggcagctggaataccgtcgcaagcactgaaaagctgggcaccatcgaaggcagcgtcacgctgggtgaaaatactaccgtcaagggaaattccaccctgacggcggatgacaatatcgccatcggcaacaacagcgtcatcaccggcaataccgccgctgacggcgtaatctccgcaggtggccagatttccatcggggacggtacccaggtcttggacaacaccgccaccagcgacggcaaagccgccatcaacctggcggacgggcaaaccctgtacatcggctctggagcaatcctttccggcaatacttccaacggcgtttccggttccgtgcaggctggccaaaacacccagatcaacgtttatacggacgccaccgcctataccttcatcaatgacggcatctccaccacggccgccgcttccacggctgacgccgctccgctggctgctgaccagaccgtcatgacgaagaccggagcgggaactctcgtttacggcggcacaggaaccaccgatacgttcggaggaacctaccagcagcttgaaggcaacctgatcatcggccatgccaccttcggcgccgttgactccaccaccggaaaagtcggtccgctccagtccatcgacgacgccgtaatggggacggacgatactgtttacgacattcggacgggacaggtgaccctggcgaagaattccaccatgaagggagcttccgccactttcggaggcgattctaccttgctgctgagcgacggatccgtactggacttcggcactcccgccacgttccaggataattcccgcgtaggcatccaggtatccgacgccagcggcaatcccgttccgctcgcccaactccgcaagggcacggaaagcgtgacggtcacgctgaacggcacggacatttccggacgcctgctgaacaacgtattcctgagcaccaccatggctccgggaacggcggaaggcaccaccaccatcacccagaatatgaagggcattgacggccccatgtccggctacaacggcaacgtttacaccgtagcggccgccctggaaaacaaccgtctgaatgtggccgccggttctcccgccgcccagttctatgaaaacctgttccgggccacgagtgcggatgaagcggcccgcatcatccagtccgtcagcggtgaacacgtggtgaacttcacctgggcagccagccgcaccgtgcggaacttcgccgacctggggcgcattcaatccgccgcctccatggcacgccagacggaagacaccgttgaagtagtggacgccaagggttctccgatcgcccgcaagacaatcgccagaggcaacggcaatatctgggtgggcggcatgggaatctgggatgaccaggatgcccgcgacggtgtttccgggtataagtacaatgccggcggttatgccgtaggcattgactacaaagccgctcaaggttccctgatcggcatcgccgccggtcaaagcttcggcagcttcaaggataagacaggcatcggcgccgactacgacgtcgattccttcctggccatgatttatggacgcatgcatcccttcagggacagcaagttcactctggacggctacggcgcctacggacgttcccgtttcaaaggtgattcctacatcatggggtccgccgccaacggcagagcagatacggacaccttcagcggcgccctttacggcacctggacggaacgtttcgcactcggcagggcctttataacaccttacacgggtattgagttcatgacttccgaactcaagggattctctgaaagcggaccttatgggcgcaccttcggccacgcccgggcccagaactggaccattcctgtcggcattacgatcgcccgcgcctaccagacggacggaggcaccaccatcaccccggccttgacggtagccgtatcccaggatgtgagccgcatgaatccgaaatccaatgtcgccggccccctcggaacctggaacgcccgcggcgtcaatgttggccgcaccgcattccgtttgaatgcgggcattgatgtgctcttctccaaccagtggggagcacgcgtctgctaccagttcgagacccgcaacaagctgaccgcccacggtatcaacggcgccctcagctatacgttctaagtaggagagcgctccagcgcatgcttttacttggttatggtaggccctttcccgccccacgcgggaaagggttttccgtatgtttccgcatccgttcttttaattcctctgcggattcccaatccgaaaaataaatccacgtctctttattatgcataaataattggaattgtgaattatataatggttttaaatttcccgcaggaaagtttctgtttataagacgactctgttcatgtatttgtataaacatctcgtttttatcgtttagtgttgacttcggattgggaatccgttacccgtgcttttttgaagtacctgatcaacatgaaattatctacattctgcatcttatgttgcctttccgcaggtctttcccaggctgccacctacgtctggagcggagcggcagggaacggaatttacggagattccaacaactggacggtcaacggcgcgccgaacggctattatccgcaaagcaatagtgataccgccatcatcggagaaaatgccggaacgatcacctgatccaccgggcaatcttatttcggagccactaacacagtccaaatagactccggaagcaccctgctttgtacaacggaaataggagatctcaacgttaattctttcacgctgaaaggcaattcccaattgatatttgaatccagcaacgcccttggactgggacgtgatttcacgctgaacttcggcacgtttacggcggaggaacacggttcctgggttgccacgaatctccccagcttctggaccaatgggaaaaccgtcaccttcgtcggcacactggatatgaacaacctttccggaagcggaactattgaactcgcttccattaaatcttcccaacagggaggcgatctcaatttggacctgagcggcctggacattaccggcaacaaccaaattcaagcggatgtaacacaggtcacggaaaacgacatcatcaaggtgttgattaactacgaaaccgttccggaacccgcaacggccacgctgagcctcctgggactgggcggtctgctgttaagaagaaagagacagtagcctcttccgcatgtctgattccaccccggcttattcctcaaggaaagccggggttttcttttgccgctggcccggtttgcgcacgcctcccttataccgcaacatttatcctgcggaaccatatagcatccttccagacggaaaaatccgttttccagagcaggtcagaactcgcaattccgcggggtacgggcaaaaggcaggacgtcgcggatgttggtcaccccggtcacgaacatcaacaggcgttcaaacccggccccgaatccggcgtgcggcaccgtgccgtagcggcgcagatccgcataccaccggtacgcttccgcattcatgcccatgctgcgcatgttttcctccagaatatccagccgctcctcacgctggctgccacccacgatttcaccaatgccgggcaccagcacatccatggcggtaacggtctttccgtcttcattcaggcgcatatagaagggtttaatctccttcgggtagttgtacacgatgacggggcatttaaaatgctcctccgtcaggaagcgttcatgttcgctctgcagattgatgccccaggaaacggggtaatcaaatgttttgccgctcttgagcaggatatccacggcttccgtataggaacagcgcacaaacggcgtttccttcacatgctccaggcgttcccgcagccccttgtctacaaaacgggtcaggaattccacttcttccgcgctgtttgccaaggcatcgccgacgagaaaacggacaaactcttccgccatgtccatgtctccatacaggtcgcagaatgccatttcaggctccaccatccagaattccgccgcatggcgcgtagtattggagttctccgcccggaacgtggggccaaaggtataaatgttgctcagggcgcacgcgaacgcttccccttccagctggccgcttaccgtgaggtaggccgccttgccgaagaaatcccgggaggcgtcacgggaagcagcgtctcccacatccaaagtcgtcacgcggaacatttctccggccccttcgcagtcactggcggtaataatgggagtgctgacccaggaaaaatccctttcctggaaaaagcggtggatggcgaaggccagcctgctgcgcatgcggaacacggctccaaacaggttggtgcgggggcgcaaatgggcgatggaacgcagaaactccggcgtatgcccctttttctgcaagggataggaatccggaacagcccccaccagctccagggaagcggcgcgcaattcccatcgctgccttccctgcccggcaaccagagcgccgcggatgctcacggcagaccccgtagccatttctccaatccgttcatagccggggataccctcatccgccacgacctgcagggaggcgacggaggaaccgtcattcacctccagaaaggaaaaagccttggaatcacggcgcgtacgcacccatccctgaatcagtacgtccggcatttcctcctcactgtccaggacatgtttcaccaatgttctgttcatcatggcgcaagtataatgcagcgccttgcccatgccagcagaattgcttcaccacggagagaatattacggattttccggcagagaaggaggggatatgccgcacctgttatttggaaggctgcatgacctgccgccccgtcgtaatggcgatggcatccgccagcggcatttccttctccgtatgggcggccccccaggaatctgaaaagataagcgttttcttttcctcgtcaaaaccgataatcagcctcaaatggcctccgcgcgtctgggacaaacgcaacggttccggaacaatgccaagctgcacggaccaaaacacggggatgcccgccatgatatagggcctgatggcattgagccacctgtccacctgggacggtgatccggcacgcgccagcttcaggacttctccgtccgcattgtcccagaaaccggaccagtcatgttcattttccaccttctcttttttcagcttggaggcggcgcggttataggctttcagcagattcctgaaatcacgggaattcgccagggaatccagcactttgatccgtatctggaagcgcgtcccgatttttttcaggttttccgccattgccgccgtattagtgcctccgtccgcagaggtattggccagggaagccagttcatgctgatccacatagtccattccataataggcaaaaatgcgggcggcggtagccaccacgcaataacctttctggccctggtgcaccatgggaatatcctgaatcaccacccgctttccttctttcctgacgtgctgcttgatatccgcctttctggcccgggaagaagcatctcccctcgcgatggaatcttccgtgggaccggccttcatccggataaattccgcttcaaactccctgccctcccgcgatgtattgatctccagggtaatcgccccgttgtcccaaatccaggaccagccgttgactttgactaccgcctccttacgggaggcccggtactccttgggctgaatcccggtaagagcggtcagggattccttgatgagctccaggcgcttgtcaaattcatccttgccaatggccccgttatcccccttgttgtacatcatgacagtcattgactggggggctccgtccttccagttcaccagcatttcccccagggacatgtcccctatcttgatggagggcttcgcaatccggagctgggtcttgcctttatccacccagccgccgggctctccgttaaaatactttccgaacaaatccggctgaggcagcttccagaacgcaccagactttaaatccggcgccatgttgcccgcaccccaggcggagggaagaaggcagcagactgaaaggaaaggcagaatggcagagataaatcgcataacgaaaaaaggggcggggaatagccccgctgctcggaatctacgctggtaatgtattctcccatgacggttctgccaagaaaaaatgaatcttcctccagcgaaccattccttctttatcctctcccatccgtccttttctaataatgctgcccggtaaaaaaaccggcctgccgcagtaaattccgcagcaggccggtttgaatgaataaaccagtccgatgatttacatgaacggacgcaaacgctgcatgatagcgtccttggaagaagctcccaccatcgtatccatgatttccccgtccttgataatcagaagagtggggatagtgcgcacgccataggtggcggccagtccgttgttggcgtccacatccactttgcccactttgatcttaccggccaattccgtagaaagctggtcaataatcggggcgatcatgcggcagggcccgcaccatgtagcccagaaatcgacaagcacaggaatgtcggacttcagaacttcatcctcaaaatttgcttcagaaaatacgtttgccatagtaccgcttagagtatttcaacaatcattacgttcacttattcttccgcatcggcgccatcatcggaagactcttcggcagaaacgtcatcggccgtttcttcatcggcggcgggagcagcgggggcaggcttggagtctccgcccagccagccaaccatgctgcgggcttccaaggtgtccgtagcgtattgatagccgatgaaaataagcgcaaaggcaagggccacaaaggagagaacattcaacagcgtactgggagccgcatccgtatcttcttgaaacttcctggccgtaaaggaggcggaagaaaccggagaggccgcgggtgcggtattcagcccgatggtggcctgcggaagctgtgctgtcgccatgcctgctccgggaggagtcagaggaacagtaggagcggcagcggcaggcgccgcgccagcaggaggaaccacgggggccacaggcgtagtggcggagccgagggcaaccgtctttaatcctccgccaagcttgatgcctccgccaagaccggcgggacgaaggggaatagtgggcgcagcggcggcaggcggagcagcaggtgccgcaggcgcggcggctaccggaggaacggccggagcggcaggtgccttgggcacggaaggagcagccggcggagtcggaatgctgggcggaggcggagtaccgcccggaatggaggggggaggtggattactcatatcggaaaaataactgtgctgaacgatagctctcgcttatttcagcccgtaaatcaagaaaaagaatgcgtagaacctgaattccatgcaattttttttaatttgaagcgtattccatctcaaacacgctgtccggacttgccctgaaaagcgttctttcctacgctgtgtatccggcattatctcatatgaaacccattaccaaactagcttcctccaccctgcccgacggctccgttctcgacctatgggaacgggacggtttccactttcttttgcgcgacggcgtacagacagcgtccagcttttcccacggaagcaatgaagcggcggcagccatggcggcggctccggttaaaagagccaaccagccctccttccttctcgacggcctcggcctgggattcaccctgttcgccctgatggatcaaattcgcagggaaaaggcccgcttcatcgtggcggaaccctgcaaaccgcttatctactggcacaaggaactgatgaaccaggaacggcccggattcctgcacgatccccgcgtcagcgtggaatttaccccggcgcttcaaatcgcccgcaagaatccgaaaagcttccacgccattctgtcccattccacgcacgaacgcatgaacctgagcgtagccgaagcttccgactattttgccgcactcaagcagggcggtctgctggtcattacggtagcccgcccggacacccgactttcccggacactgcaaaaagcggggttcgaagtaagcacggaagccgttccggcctcacataaaggaaagaaaaccgcttttcacaccgttattcttggaaagaagggacgtttcgtccccttctccgctcaccagtcctgatcccatcctattattatgaactgcacatcccttaccatggccggacttctggccgccctgtccctgggaattccctccctggcggattccattgccccgggcattcttcttcccaaaaaaaataccaaatccatttccttctcccccaaggggacctcggacattttcctgctcggcatcatgccgcagggaagttccgtcaagaaaggggaatccgtagctcaggcggacttccgcatactggacaatagtatcgaagattatgaacgcgccatcaagagcaagaacctggaggtgctgaaactccggtacgccctggaccagcagaaggaacgttccgccctggccctgcaaaaatatcagacggccctgacacggacggaagaggatcaaaaggattttctggaaaaacggaaggcccgcatgctggcggaagaagaggaacgcgtcaacaaagccctgcgccacatgtcctacaaacaggaagagctgaaccagcttaccaagatgtacaaggatgaccaggtggcggaagaaacggaagagatcattttgaaacgcctgaaaaatgaacttggtgaaagcgaatttgccgttcagggagccaaactcgttgcggaactggccaagctgcgcaatattcatcgcctgggggaagactatgctacggcagtcaaggaaaagcagatggatctggaacaggcaaggaagcaggcggattttgatctggaacagaaaaagatagccctgacggaggcggaagtctccctgagacgccttcagaataagtacaatgaactgaaagcagaccgggaaatggcctctttcaaggccccggaaaacggcatcctgctgtacggcggatatgtggcggacaagtgggtggccattccggtggcggaaaagctgaaacccggcggcaaactgggagcttttgacaaaatcgccaccatcgttccgccagactcggaactgattgtccaggctactcttccggactccaccgctacgcccaaggtgggggaaaccgtcgtcatcaaaataacgaacatgcagattcccggcgttattacggaagccagccccattccgggagcagacggcaagcgccgcattatcatcacgcccaaggttcccgccagccagattttcgcccccggccttcccgtccaggtgaccatcaaggaccaacaggcctgatttcccttaacggatccccatgaataaagccgtccttttccttgccgcccttggagccagtacgtcgctctgcgctcctgttccggcggaaaaagcggaaaaaagggataccattcccattgccagggttccggatgttccgcctccctcccgggaaacgctggacgcttctatccggaaagcggctgactttctgttgaaagaacagaacagggacggttcctggggaaaccatacgcgcaccaagggtctgaatgttctctgcccttatccggaaggccccagatcattcaggacagcctccacctctttgtgcgtgatcggcctcctgaccagccccctgaaagaagaccccgccgtcaaggcatccctggacaaggcgctgcagtacctgctaaccacgctgcccaccctgaaacggggagacacccgtaccgtgcttggcgtatggggccatgcctacggcctctccgccctgagccgggcggcgcggaaccttcctgcggatgcccctttgcgcgaagaactcaaaaaggtggcctccctccaagtcaaagcgctggaccagatggcggacgtccaaggcggctggggctattacacatttgaaactttttccaagcgtcccattggggaacccacttccttcctgacggctacagtccttcttgcctacaaggacgcggaacaggcctttggcctcaaagcggaaccccgcatcgtcaaacgcgccgtcgcctgcctggaaaaactgaggacgcccgccggcagctacgtctattccctttcccattccttttatcccggcaggcccatcaaccgccacaccggcagcctggcccgcactcccgccggggatctggctctgatgcggtatgacccgtcctttatttccaggagtcagctggaagacggcctggaacgcatctggagccgcggcggctggctttcgctggctgtaaagaagcccattccccatgaaagctttgcccagaacgcgggctattttttctattacgggtattattacgccgcccgctgcctggaggaagtggcgccggaacacctggcgcgccatgcggcccatctggcaagcgacctcctgcccatgcaggaagaagacgggtcctggtgggattaccccctgtacaattaccacaaattctacggcaccggatatgccttatatgccgtctcccgcgtcagagaatccctgtatccctctgatgcggcaacaacttcatgacccatgtcccgcccgctgacgaccatttttctcgccaccttgtgcctgcatcttcccgcagcgcagggggaatccgtgccagaggaaaaaacggatgttattccaatcgccaaaatcccggatatttcccccgcaaaacccggacaatttgacagggcattccgccgcggcgtggatttcctgctgaaaacgcaaaataaggacggctcctggggcgaccaccgggtaatcggcacctggaacatcctctgcccctacccggacgggcccctcaccttcaaaacagccagtaccgccctgtgcattgcagggctcaacgccagccccctgcatcatgaacccgccgtgcaggaagccatgacccgtgctgaagactatctaatccgtacgatgccccatctgaaacgcggcgacgctctgtgcgtttacaacacctgggcgcatacttacgtgctggatgccatgagcatgagggctgcaagactggccccggacagccttcgctacagggaactgaaggaatgcgcccgctcccaggtaaaaaaacttaatgaactggcttccgccatggggggttggggctacctcacttattccggcttcagcaaacgccctgcggcacagcccacctctttcctgacgggaaccgtccttatctccgcctggatggcaggaaaatcattcggcctttcccttgatgataaaatattcacccgcgcgctgaaattcctcaaatcccagaggacgcctgcgggaacctatgtttattccctttcccattccttctatcccggcaggcccatcaaccgccataccggcagcctggcccggactcccgcctgtgattacgccatcaggctctgggaaccggaggacatctccctgcgccagcttgtggacggcctggaccgcctgtggagccgcaggggatggctgacgatggccctgcacaaaccaactccccacgagagtttcgcccagaattccggctattttttctattacggatactattattcaggaatgtgcctggacatgctggcgccaaaccaggtaaagcgtcatgcatccctgttggcggacgatattctcacccgccagggaacagacggggcctggtgggactaccccctgtataattaccacaaattctacggcaccggatatgccctgtacgctctttcccgcgcctgggacaagctgtacggccaaccggaaccttttccatcctctatttccacactatcccggccatgataaataccatgaaatcgcttttggcgctctgcctgttttacagtgcggcttccgtttccaccgcagaaaccccaattaaacatacttccttcagacccggagaaatctggacggacaacaacggcgcgcacatcaacgcccacggcggcggcatcctgtacgacaagggaacctattactggtacggggaacacaaggtggagggggacgcgggaaactatgcccaggtgggggttcactgctattcctccaaagacctctataactggaaggacgaaggaatcgccctgaaggtggtggagggggatcattcccaccccatcgccaaaggctgcatcctggaacgccccaaagtggtttacaacaaaaagaccggaaagtacgtgatgtggttccacctggaactcaaggggaaaggatatggatccgcttacgcgggggtggcaacggcagcaaaacccacagggccattcaagttcctgaaggccgggcgagtcaacccgggcaaatggcccctgaacatggataaaaaggaccaaaccatggagacattcaaaggggtacccggcctgacttccagcgcgctgcccgaaggcgtacgttccgaggatatgttcaagaaggattttgaaaaaggacagatgagccgggacatgaccatttttgtggatgacgacggcaaggcctaccacatttattcttctgaagaaaatagcacaacacacattgcggagctgacaccggattacacggggcatacgggaaaattcgtccgggcatttcccggacgcttcatggaagctcccgccatcttcaaacataaaggcaaatactatttcatcgcctccggatgcacgggctgggctcccaacgccgcccgcagcgccgtggccaaaaacatcgccggcccatggatggaattgaaaaatccctgcgtggggcccaaggcaggcatcacgttcggcggccagagcactttcatcctgcccgtgcagggcaagcccggaaaattcatcttcatggcggacatctggcgaccgcaaaatgccattgacggccgctatatgtggcttcccatccagtttgacggagaccagatcaaactggaatggaaggacgaatggacgctgaaagacatgtagtacgtttacctccaatacatatgaaaatattaacagccatcctttccgctaatctggcatgctgccttttctccgttgccgcagcagaaaccccaattaaacacacctccttcagacccggggaaatctggacggacaacaacggcgcgcacatcaacgcccacggcggcggcatcctgtacgacaagggaacctattactggtacggggaacacaaggtggagggggacgcgggaaactatgcccaggtgggggttcactgctattcctccaaagacctctataactggaaggacgaaggaatcgccctgaaggtggtggagggggaccattcccaccccatcgccaggggctgcatcctggaacgccccaaagtggtttacaacaaaaagaccggaaagtacgtgatgtggttccacctggaactcaaggggaaaggatatggatccgcttacgcgggggtggcaacggcagcaaaacccacagggccattcaagttcctgaaagccgggcgagtcaacccgggcaaatggcccctgaacatggataaaaaggatcagacgaccgaattcaccaaggaaatgcccgactacgtccgcatcatccgcagggactatcccggcgggcagatgagccgggacatgaccatttttgtggacgacaatggaaaagcctaccacatctattcctcggaaggcaatatcacccttcacatcgcggagctgacgccggattacacggggcatacgggaaaatatgtccgggcgttcatcaaccgctacatggaagctcctgctatttgcaaacacaagggcaaatactatcttatcgcttccggatgcacgggctgggctcccaacgccgcccgcagcgccgtggccaaaaacatcgccggcccatggacggaattgaaaaatccctgcgtggggcccaaggctggcatcacgttcggcggccagagcactttcatcctgcccgtgcagggcaaacccggaaaattcatcttcatggcggacatctggcggcccaaaaacgccattgacggccgttacctgtggctacccatgaaatgggagggtgaccagattatcctggaatggaaggatgaatggacgctggatgacctgtaaattcatctccttcctttttatgcaggatacggtttattgcttccatctccttgccggaaggcagaagcggagccttctgtatgccttgtgctccgctctccttgttgcagcagtctggctgcttcatccggaatggcctttctgggcgggctacattgcctgggcactcgcttacgcggcaacgctgattgttcaacacaccattccccttcccatccgctgcccgcactgcggaaacgccgggctttattctgctccgcaaactccggaagaacaaagaaggccggatacaggcatcatgctggaatgccggggttgcggttccaccttttacacggacgcctatttgccctggccgggaaaaattatccgccggcgccccatttgcccggaagaatgggaagaaaaatctgcccgtaaacaagccgggcccgcttcctccggagaggaacgcaggccggaaaggtctttcgtcaacggaggaaaaatctaacgggcttttttggaagccatcacgtaattcctcatgcgctggtctgcgggggtggtggggcgcacgctggtaacccaattgccgtccttatccttctttttgatttccgttctgtcgcggtacaatttcgcggagaaatcgctggaatcaagaacaaccggccccggacctgtcgtgacaatgggagtgggaggaacctccgcaaccaccgtcattggagcggcaagggaattataccagtacaccagttcctgctggccgacaggatcgtccggataaggagcataagctccgttattggtggaaacctttacataggccggttccggaaatgtggtctgataggaagagggggaacaggcccccaacaacaaaaggccggctccgccggcaataatcatggaatgcagtttcatataggcattggactctcttccgccacctgccgttcagaggatgtacggttccggaatattacgggcacccgcgcgtcttgcgcttgagcgccattcccagcgccgtacgccatcatgcggaggaaaggagcttgccgtccccccggcggcatggttgaatattatttcctctccatgattacggatttccggctgaaagtgtttgaaaccgtcgcacggcgcctgaattttacgcgcgcggcggaagaactgttcatcacgcagccggccgtcacccggcatatcaaggaactggaacgtctgctggatgcccgtctgttcaaaagggagggacgagggattgccctgacggcggaaggcgtgcgcctgctggcccattcccgccgcatcctcaaggaatacgaaacgctggctgaagaaatatcctttggccgcaattcccctgtttccggcgaattgagcctgggagccagctccaccatgtcccagtatgtgctgcctccgctgctggccctgttcaaccgccattacccggaaatacgcatatggctgaaaagcggcaatacggaggaaatagaacaggccgtccaggatgaatccgtgcagcttggcattgtggaaggcacggcaacgcgcgcggacctgcattaccagccatttatggaggacgaaattattctggcaggaggcatgcaggccgccgtgcccagtgaagggctttccctcccgcaactctcccatgtgcccctgatcatgcgtgaaccggggtccggcacgcgccgggtggtggaggaagcgctgaaaaaacacgggatctccgtttccggcctccatattctgatgacgctgggcaatacggaaagcatcaagatgtatctggagcattctccggcgtgctctttcctctcctcccttgccgtccggggagaattcaaacgcggaagtttgaagaaaatacatctccgccacctggaaatccgccgcaccttccacttcgtctcaggacatggagaccacagcagaatcaatgaactgttcatcaagttttgccgatattattataacaaaatttaattggctataataatttttaattagattttataatgattgcatcgtatatcattccgcagccaatccggtacgctcccggccagatacaacgggcagccgcaaccatcatttaccgaccatgtctcccaaacatctagccaatcccctccacggcatcctgcttattgttctgttttccttttccgctttttacattgcggattttgaatgggtgaaacatctttccctcagcccgctgatcgtcggcatcgtgctgggaatgctttacgccaacagcctgcgcaaccaccttccggaaacatgggttcccggcattcagttctgcaccaagcaggttttgagaacaggcattgtcctgtacggattcaaactgacttttcaaagtgtcatcgacatcggcggctccgccctggcgctcgaccttattgtggtcactctcaccattcttctgggagccgggctggggcgcctgctgaaaatggacagggacacggccctgctgacctccatcggcagttccatttgcggggcagcagccgttctgggggcggaacccgtcgtcaaaagcaaaccttacaaagccgctgtggccgtttccaccgtggtcatcttcggcacgctctccatgtttctgtatccagccctgcaccgggccggaatactggatctgacgccggaacaaatggggctttttaccggagccacccttcatgaagtggcgcatgtggtgggcgccggcaacgccatggggcaagctatttccgatccggccattatcgtcaaaatgatccgggtaatgatgctggccccggtgctggtcgtcctgagcattgtcctggcccggagggaccctcttccggagcaaacggggaaaaacggaaaattaccattccctggttcgccttcctgttccttgccgtcattggctttaattccctgcacctgctgcctgccggacttgtggatgccataaacaccctggatacattcctgctgaccatggcaatgacggccctgggcgcggaatccagctttgagaagtttaagaaagccggagcgcggcctttcctgcttgcaggcttcctgtatatctggcttttcttcggaggttactggctggtcaagctgatcagcctctaaattccaaaaacactcctcctgcggaaagagggcaaggcctgcgccctgcctttccgaacaggagaaaaaagccgtttcaccggcagaacgtgagaaccgtttcagcacaggttcaccgcctcgttccatcctgatttcctgccagaaaatccggttgaaaaggatcaacggaggaaccatgccggcatgggatgacggaacatgcggagcgccgcatcccgcccgcattactcccaactggccatctgtgccgcccaatacagacatcctctctttgctttctccgctgccgcggcaggttttcccggtaaggctcaacaaaaattcatagtcaaaccgtttggagacgctatagtatgcgtacccagttcttaaaaacaaatggcaaccaaattattcattcccggacccactgaagtagcacctgaagtacttgccgccatgagcggcccaatgatgggacaccgatccaaagcggcctccgccctgcagcgccgcatttccaacaatctgcgccgcatcctgctgacagaacaggaaattctgctttccacttcctccggtacgggcctgatggaaggcgccgtgcgttcctgcaccgccaaacgcgccgccattttttccgtgggcgccttcggcgacaaatggtacaagatcgctacgggcaacggcgtgccctccgatattttcaagagcgaactggggcagcccactaccccggaaatggtggacgccgccctctccaccggcaaatacgacaccatttgcatcacgcacaatgagacgtccaccggcatccagaacccggtggaggaaattgcggaagtgcttaaaaaatacccggatgtcgtgtggtgcatggacgccgtgagttccgctgccggctcccggattgaaacggacaagctgggcgtggacgtactggtgacctccacccagaaggcgcttgccctgccccccggcatggctgtctgcacgctatcccaaaaagcgtacgaacgcaccgcctccgttcccaaccgtggctgctactttgacctgcgttccatttacgacactattcagaagaaggactaccagtacacgaacactccctgtgtctccatcatgtacgccatggacctccagctccagcgcatcatgcaggaaggtgtggaaaaccgctttgcgcgtcatgaagccatggccgaattcgtgcgttcctgggcggatgaatatttcagcgtctttgccaaccgggaccacctttcccgcaccctgacggtgatcagcaacacgagggacattgacatcgccgccctgaacaactccctgattgaacgcggcatgcagctcggcaacggttacggggacttgaagaacaaaacgttccgcattgcccacatgggcgagctgacaatggatgacatgcgctccatcacgtccagcatcgtggatatcctgaagctcaaataagccaggcccctgccctcttttccggctccgtccggaaaagagggcggaacgcctccgccggaacatgaacggaacaatcgccgggaacaggatacatcgcggatatcccggaacttgttcatctttgatcttttccgcatcccggcggcattcgtcatcgtccaaactttcaatcaggcacggtctttccgggacaacccgttctttcaggactccatttcacgttatttgctgctgttcattgcggcatgcattttggccgggcttgtttccagcattcgtgcgctatatcatccttcccattactgactttccgaactcttccttccatgtccactctccatcccttccccgccctgcgccctcctcgggaactggccgcgcgggtctcctccctcccctatgatgtcatgaaccaccgggaagccgaggaaatggccgccggaaatgacgcctctttcctccatatctgccgttccgacatcgacacgagcgaagccgccatccatgccccggaaacctacgccaaggccagggaaaacctggaaaggtttgtccgcgaaggttacctcttccgggatgaacggccgtctttctacatctaccgacaaatcatgtgggggcgcgtacagacgggcatcgtcggctgcgcctccgtggatgaatatgccagcggcgccattaaaaagcacgaactgacccgcagggaaaaggaacttgaccggattgagcattttgacgcctgctccgctcagacggaaccggtattcctggcctaccgcaaacatgaaggtctttccgccatcatccgggaatggattaaattccacaaacccgaatatgattttaccacggaggacggcgtcacccatatcctgtggcccgtttccgagcccggcacggtggaagacatccgcaaaagctttgaggaagtggacgccctttacattgcggacggacaccaccgcacggcttccagcgccgccgtttccgccaggcgccgccagaaacacccggactacacggggcaggaagaattcaactacctgatggctgtcgtcttttgtgatgaagaccttttcatcatggactacaaccgcgtcatacgcgacctgaacggcctgactgaagaggaattcatggaaaaactccatacctcctttgacataaatcctgtggataccattcccggagaaggctacgccccccgcgccaagcacgagttcggcatgtatctgaatggacgctggtattccgccacggccaaaccgggaaccttcccggccggccatcccatcgaaagcctggactgcgccatcctccaggcgaatgtgctggctcccatcctgggcattgacgatccacgcacgagcgaccgcatcgacttcgtaggaggaatccgcggtctgggagaactggaacgccgctgttccggggaaatggcgctggctttctccctgtatcccgtcaccatggccgaccttttccgcgtagcggacgccggagaaatcatgcctcccaaatccacctggtttgaacccaagctgcgcagcgggctttttatccataccattgaacaataatcttttccaccgtaccaacatgaacaaggtccttattcctaccaaactctccgacgtagcggccaacacgcttaaaacggccggctatgaagtcatccaggacgctgatacgcctctggaaaaacaggtagccgcccatccggatgccgtggctctgatcgtccgcagcgaaaaagtcactccggaaatcatggacgcccttccttccctgaagctggtcgtccgcgccggagccggttacgacaacattgacattgtgtacgcccgcaaaaaaaacgtggacgtcatgaatacccccggggccaactccaatgctgtggcggaagaagtcatggccatgattctggcctactaccgccacatcgtccaggcagacgccaccacccgggaaggcctgtgggaaaagaaaaaatacatgggcagcgagctgaccaaaaagacggtgggcatcatcggcctgggcaacatcggccgcaacctcgtcaagcgcctgcagggatttgaacccattctgctgggctacgaccactttctggcacgccagcgcgccctgaacatcggcgtcacccctaccagcattgaagatattttctcccagtgcgacattattaccctgcacgttccgggcggcccctccacccaccacatggtgaacgcggagctcattggaaaaatgaaagacggagcagtactcatcaactgctcccgctacggcgtggtggatgaagaagcgctggccgccgccaaggccgcaggcaaaaacatcggctacctgacggacgtacatcccaaggacgcgcccggagagaagccttccgcccccattgcggatttgattcttccccacctgggagccaacacccgggaggccaatacgaaagcggccaaacgcgccgcagaacagatgatcgcctacttttccgacggcgacacctcctgcgtggtgaacggggaatcccccaacggcctcaatccggcccatcttcaactggcgtttctgctcgcctccctggcgcgcaaggccggcggcaacaagcccatccgccgcgtggaatgcactttttacggcaacctgcgcattttccgcaaatggtttacggcccccattctggaaggccttctgccgcatgcggaaaaagggctcatgcctgccgccgcggaagaatccctgcgggagcacggcatcgttttcaaagcgagggaacccaaagacgacaaaccttatgaagattccatcacgctggacgtggccatggaagaggaagaggaatatttccacaccagcgtgcgcggcgtggtgacggaaggcatccccatggtctcccgcctgaacaatttcaacggattgtacgcggacctgcgcggcacgacattatgcctgcgctacaaggatcgtccgggtgttatcgccctcatcggctccgccctgtcttccaatggaatcaacattgacaacatcgccgcccctgccgaccacgccaccagggaggccctgaccgtgattaagaccaaccagccggtttccgatgagctgctggataaaatcgcgaaagagatagatgccatctctgctttttccctgaatctttaacagggaaagacgtgtttccggaaacctgcttttcaggccgcccgcttccttcatctccagagggaagcgggcggttcttatttctgccatgttgacaaggcttacccatttttataccattgaccgaatcgtcggaacatatccatgcgttacgtactgcttctcctgaccctgttaaccgccggattttccgtctggtactatcaaaaccgcatttccccggaaggaaaggaactggccgcccaaaaaacaacattggaacaggaggccgcaatattggaaaaagccgttatccaatcccgaaagaagctggatgatgcccaggatgccacccgggcggcggaagaagacatagagagattccagcaagcttatctcgaacaaaaaaggcagcagcatcaggaaatccaggatgccgcctaccaaaaaaacgtggcggaccagcaggaagaagtgaaggaacacgaccagaagattgaccggctgcgccgccacatgaaaaggcaaagggaaagcaccaaatccgccagggaggaactgctccggaaaaaggagggaatgagaacccagcttgacaggctgaccgatcagcagaggggcattcaggcggaattggaacaggcggaacgcgaactggcccaaaaacgggaagaggccaaaagcaggaagaaattgtccgggattgcccctcagaagggaaatatttccgaacttcaggcacagatgaaccttatccgccagaaaaccgcagctgctaaggaaaaaatgaaagccgtagatgcggcgctggaaactctggaagaaaagtctggcaaacaggaacgcctgatgcagaaggcggaggagaaactcaccgaacagaaaaacaaggttctggccgacgatgaccgggacgaatccgctgtcccggaaccgggcgatgaagacttgctggcgtctgccgaatacagggagctgtccagagatgtacggaaaactctggaacaggcccgtaaaaaagaagaacaggcatcccgggcctatgacgaagcccgcgcggccatgcggaaagtctccagggaagaagtgaaaaagctggcaaagaaggaaaaagaccatgcctcctttcagaaactgttcacgggtgcagcctccgtcgcgggatttatcctgctcctgttcacgggtgcggccttccgcagcagcaacagttgaacgtctgccggaaaatgaaatgcacggagaacaaggaagcacccgccttccctcagggagtcgttgacggacggcagggatatgatagtctcaggccagcctgatcatgctcacactggcccagattcacggacaaccggaaattttccattccattcagggggaaggagtctcccagggaacaccctgcgttttcctgcgtctggcaggctgcaatctggcctgttcctggtgtgatacggcgtattcctggaacggaacggctcccggagtgcgcctcgcgcctgaaaaggcggctgaactggtgctccattatccatgccgccgcctgatcctgaccggaggggagccgctcattcagcaaaaggcgcttcccgccctgctgcgcctgttgccggatcatgccgtggaaatggaaaccaacggcaccatcatgccggatacggaactgctgaaacgcgtcacgcaattcaacgtatctcccaaactcccccattcaggcaataacgacgttaagacttggaaaccggatatcctgcgctgtctggcgggtacggagaaagcctggttcaaattcgtcgtggcgtgcgaggacgatgtcagggccgttctgcagcgggcttccgaagcggacattcccccggaacgaattctgatcatgcccctggcctccacacgggatgagttgaacgccatgcgtccgcaggcggtggaatggtgtctccgctacggtcttcgtttttcagaccgtctgcatatcgccatctggaacagcaaaaaaggcgtttaagcacgctcctgactcatcaggaaagacaaatgcttcccgcttttccggccggaattccgcaagcctccaaggctctgcgccatcgggaaacctacgctttctgtttcaaatccagcagcatctgggtattgctggggtatttgttcaggaaaaacaggaaccgttccatggcttctacgggtttatgcccggctaaagcgcggcgaatcagattcatcttgtacagccatgcttccggcataatgagctcttccctccgcgtccccgatttcagaatgtccacggccgggaagatatattgctccgcaatgcggcggttcagcacaagttccatattgcccgtccccttgaattcctggaaaatcaggtcatccatgcggctgttggtttccaccagggcggtggcaatgatagtcagggaaccggcctggcgcgtattgcgggcggcggcaaaaaggcgccggggcatttccagagcgcgggcatcaatgccgccggacatcgtgcggccgcttcccttgtcagcgttattgtaggcgcgggccaggcgagtaatggaatccatcagcaggaaaacatgctgccccgcctctacaagccgtttggcgcgttcaatgcaaagttccgccatgcggcagtgatcgcgcacccttccatcattggaagaggcgtatacttcagctccggggagggaacgtttaaactccgtcacttcttccggacgctcgtctaccagaagcaccatcaggtgaatggaatccctgtaattctccagaatggcttccgccatgtgctgaagcagcgtcgtcttccctgcgcggggcggagagacaatcaggccgcgctggccgcgcccgattggagcaatcagatccaatgtgcgggtggtgtaacgctccggccgggtttcaaaagaaatacgcttattaggattgaccgccttgagctcttcaaagtgcgggttcttgcgcgctttctccggagcaaccccgttaacggaggcaatttccgtcagaagaatgccgcggtcatgacggcaggcctgcccatgcacccacacggcaggacgcagaccgaacctgcggatcatatcctgcggcacataaacggcttccgcaaaagcgtcaaaatcattatccggcttccttaaaaagccgaaccccttattcgtaatttccagcaacccgtccaccggttccggcggcgccagttcacggggggcgctgttctgtggggttccgccctcctgattattattccagcggtttttaacccggtcattgccgtttctgccattgcggccatcctggcggttattccggtttttgttgaaacggtcgttgttattccggcggttctgcctgtcaaaacgctgcctttgcggctcatttgtccgacgcggctcccgggcggcatcttcggaaaaatccgccgcaccttcctgcaccaccttgatggacggaacggaagcatccgcctccggctcctgttctctcggtttcctcacaaatctctggcgaataaccttcggcctgccttctgcgggctgctccggaacagaatcggaagaatcggaagccggctcggcaggcgccgcatgaacggcaatttccgcctcagggccggctgaatcaccgttctccggagcaacagccttggcagcacgcctgcgcaccggcttgacggcggcttccgttccggagacaatcgcagagccgtcagtttccggaacctcctccacaggcttcttgcgcgggcgtccgcgccggggcctggcaggaacatcctgcgcttcttccaccgggatttcagcactgctcttacgggaagtcttcttccccggcacatcgacactttccatcccatcatccgccaattcagcaaccttcttccttatcgtccgcttgcggggcgccggggaagaatcctgttccgtcccgggcacttccgcagcagtctggggctttaccggagcttccgccgcagacttggttttgcggataatacgttttttgggcgccggctccggagaaacctgttccggagtcaaatctgggggggtatcagacatggaaaagaaaattgaactgcaacaacaggcgtctcctgaaggacaacagcgttaaccaagctgctcaaggatttcttccgccacatcgaaattggagaagacgttcagcgcgtcatcatagtcgtccagcgcttcatacaggcgcagggcggcctttgccgtttccagatcattaatcacggaagcattctgcgccacggaaatcagcttcatggaaattaccgtatgtccggcttcacgcagggcggcgcacacgttgttcaactccgttgggctcgtaacaaacacccattcattgtcggaatccccctgttccacatcatccgcgccgcattccagcgccagatccatggcggaatcctccgtaagaccttccgccatgatgcgggcctctcccttgcgttcaaactggtaagccacggagccgggcgtaccgatgctacctccgtttttggtgaacagggtacgcagctcggaagcggaacggtttgtgttgtccgtcgccacttcaatcaggaaagccgtgcctgaagggccgtagccttcataggtaatctcctggatggtagctcctcccagttccccggtgccttttttgatggcgcgttcaatattttccttgggggtggacacggccttggctccgtcaatggcggcgcgcaggcgcggattcagatcaggatctccgccgccgcttttggcggccagcatgatttcatgggcaaagcgggcaaaaaccttgcccttcttggcgtcttccttagccttaacgtacttgatcttagaccatttattatgtcctgacatagaattgggaataatagtaagtgtaggtgaaaagagacaaactaacaagtggaactgttctgcaacccggggaacacattgtcatttgcaaataccacgcaggaagggaatcagggtgcggccatccgtaaatacgttacaggtaccggatactctgccggggaacacgccgcgcaccttcaggagctccggctacctcttggcagtcactctcaacacacgcaaaataacgtattccccagcattggcaatacttttttaggtcacggcaaccggctgctttcagagctatcttctaccgccttcaattaatttttaatatattttgattatttaaaataataaatactgtttctttaatagtgaaaataaaaaaatatatccgcacagcaggcccctgttacacatccagccctgatggtgcagggggtgattccgtcataggccaaagcctgagttctaacgccgcctctgttatcattgactaagaaagggaggcgggcttagatatgcccttctttctttttccctgtcttatggaacaagcagcgcaccaggaaaaatcacatgcggccctttcctccgtcctgtggtccgcctttttaacggtcatcaagctctgggccggcattgtaaccggcagcctcggcatcatttccgaagccctgcacagcgggctggacctgatggctgcggccatgactttttacgccgtaaaagtagcgtcccgccctgcggacgaaagccacccctacgggcacgaaaaggtggagaatctttctgccctggcggaaacagccctccttttagttacctgcgcctggattgtctgggaggctgtggatcgtctgttctacaatgaggcggagattaccctcacctggtgggcttttgccgtagtggccgcctccctgctggtagatgtgaaccgttccgccatgctccgccgggtagccaaaaagcacaaaagccaggccctggaagcggatgcacttcactttaccacggatatctggtcttccgcagtcgtgctcctgggtcttttctgcatatggctggcccatctggtccccgcggaatcagcctggcacggcctcctggagagggcggatgccattgcggccctgtttgtggcggctctggtttgttccgtggctttcggccttgccaaacgttccatccacgccctgatggacggcggttcttcctccctgacgcggcaggtgctggacgccatgaaaaagaatgccccggattatccggtcaaacgcatccgcctgcgtgacggaggctcgcgcatctttgtagagctggatgtggaagcgcctgcggaactgcacgtggatgacgcccatgatgtggcggaatccattgaaggcatcgtaaagcatgaattgccggaagcggacgtcatcgtccatatcgaaccggcgcgggagaatctttccaatatggagccggacatgattatccaccggttggccttgcgccaccatgtccgcattcacggtttttatgcaggccacggcaaacaggccccctgttatttcatggatgtggaaattccggcggattggcccctggaacgcggctaccatgtggtggaggctttcagggattccattctgcatgaactcaagccggaaaaggtaatttgccgcattgaaccggattgccgcgacatggaaacaagcgccattgcggaacaggtttctccggaggaagtgcgcctgaaggtaaatctcattctccagcaacacagaaacatccgcaagatcctcaagctggacctgaccagggaggacaatttcccaaccttgacctgtgtgtgttccgtggatgcctccctgactatccgggaatgccaccagatcgcctcgcagctggaaaaccagatagaaaacgcactgcaccacctggggcgcgttaccgtcattcttaaaccgtccaagctgggcagaagttgaatgactgttgccggattcccgtaaaaacatgttccgaatccgggaaggggaaacggtgtccattccgggcatgggaacctccgcccggacaaagcggagccaacgattatgaatggcccgcaacggagactccgggcatttccctgtccagctccgcgcgaatgcgctggcgctcggaaacgatctgttcgtcgtccgcaccgccttcccgcaggaaatattccgccatggacagggctacttccgattccgaggaaaaaacctgggaagcgccggcttccttcagtatatccacgtccctcatgtacttggtgtgaatcatcacgtcaatatgagggttaagctccagagccacgcctactatctccttggcgtccggaatggaagcggagagaatcaggctttccgcatattcaatacccgcatggcgcagaatttcccgctggctggcatccccgtaaacaatatcccctccctgctcccgtatagcggtaaccgtgtctatattcatttccacgatgatgacttccaccccgttgtcattcaatatcctcttaagaatgcgccccgtggggccaaaccctaccaataccacgcgccgcgcatccggagcgggcaaggccatgctgttcacgccccccgggttcgcaagccctatgccgcgtttttgcagccatttgactgcaggtccaatctgtcggtacaggatgggatttaaggaaatggagacgacagccgccagaatgatggcctgattggcatccggaggcaggatgttgtacatgagccctattccggcaagaatgaaagaaaattcacccacttgagccagggccacggatacgctcagcgccagcggcaccggccgcctcaggcaacgaacaaccacataagccgccagcggcttgccgatcatcaccacccccagcgttgccagggccagaggccagcaatcccccacggacatcggatcaaacatcatccccacggaaacgaagaagagaaccgcaaaagcatccctcatcaacatggcttccgccgccgcgcgcgcgcagaagtccgactggcctacaaccatccccgctaaaaacgcccccaaaaccatggaagcgccaaagaatcccgcggagcacaccgccacgcccagcgcaatgaccagcacagccagcgtaaacaagtcacgcgcgcccgttcgggccacgtaccgcagcaccagcggaatgacttttttcccggcaaacagcgtcagggccaccagcagggccagcttgacgaacatccagccaagctcggaaagaatgccgccccagtctccggcgccgctctggcgcgcttccatcacggcggggatgagaaccagcagcagaatggtaaacaggtcttccactaccagccatcccagggccacatggccgccgggcgtatggaggttctggttgtcttccagcaccctcgtcagcactacggtactcgccacggaaatcgccatgccaaaaaccagtccggaaatcgcggaccatccgaacatccacccgaccagcacccccagcacggtagccacggatatctgcacaacggctcccggcacggccactttttgcacggcaatcaaatccttcaaatggaaatggagccccaccccgaacatcagcaggataacgcccagctccgcgaattgttccaccgtatgggaatccgcaacaaatcccggcgagtacggccctaccgccaccccggccagcaggtagcccaccagcggggataaatgcagttttctggcaataaggccgaaaagaagggcagcggccaatccgccgacaaaagtgagaataaggctgaaatcgtgatccatacgcgcgtgacagggataaggggtattcttgaccgccaagtcgtttttacgctatcgcgttttattttccctcacaagaacgcattgcgccgcatggaaatgcagtcgcactttttgcatgaaaaatggtcccgtcaaattttcatcataccctatttgcgaccgcttctaattaaattttcccatacgggattcctatcaaacgtgttagtaaaattcgtcctgttcattcccgggaagctgccgggtcattgtcccgcactggcggtcggacaaatacccatacatcaccatcggcaatttttacatcctgctgccggacaacggaaataatccgccggcccggaaaatccaaagcaggaacgcccgccgggcagacactttcgttttcaggctcttccatgctccatgcccatacccctgaacttggaaaaattgataaaatacccccaattccatttgaatttccaggaaattaatttattttatattggaaataattgattttttcaaatctatgactgaagatgccatattcaaggaacagtggaaccttcttaagaaggagatggcaatgggagacgctcatctccagcaaaggctggaacagttcattttccggcaatacggccgggcggttctgacgcattacattaaagccctttccgtcctggagctcagccgccatttctacctgcggttccgcaggaggagccgtgccgtaacggaacccattctctactggaacgtgcttgcggaaacaaccatccacatgacgctggagggagtaaaagacatgcaccccttcatctccctgccggcacgtgccggcgcaaccttccagcttgacatgttaaaagactgctaccttctttatttgagggaccgggaatatccctgctggcccagggcctcccgcagaagccgcatcatccggaacaaatggaacgctccggaactggaagccgcctatttcctccggttgtgccagaacagcacggaccgtcattatgccaacgtgatgaacatcctgctggaagaaatactgcatatgctgattaccctccgccaactcaggaaccacggaaaaaacctgctggaactcagaagaagccggaactccaattcttccccgggcggcgttccgccgccgtccctccgcccgcagcaccctcccgaagacagtctttaaaaccatccgcgctttttccaaaggatacttgaaaaaaccgccgggaccttacaaaatcaacatgcagtctccataggagaaaaatctgtaccgttcccggatggcttccagataggctttcatgaccagctccctgcccgcaaaggcgctgacaagcatcagcagcgtgctctgcggcaaatggaaattcgtgatcagggcgtccaccaccttgtagttgtagggaggataaatgaagatgttcgttgaaccggaacactccctcaacggcagaccttccgccgttgccacatgttccagcacccgcacgctggtggtgcccacggcaataacccttctggcgttattgactgcccgggcagcggcttcaggaagaaaaaaatgctccgtatgcatctgatggtcttctatcctgtccgccttgacgggacggaatgttcctacccccacgtgcagggttagaaaatcgtgggggacggatgccagcagctccggcgtaaaatgcagcccggccgtaggagcggcaatggccccttcatgcctggcgtaaacggtctggtaacgctccctgtcggatgggtcgctttcccggttcatatagtggggaagagccagacgcccgtatttttcctcatccacttcccggtcaaaccggataaggcggtacccttcctcatcaatgccttccacggtgcccaccgcctctccgaccgcaaccgtacgcccaagcttcattttgcgtccggggcgcaccatgcacttccacaacaggggattaagaacctccgcgcgtactatttcaatggaaccgtcgttggaaaaatatcttgccggaaccaccctggtatcattcagaataaaatgatccccttcccgcacatattccggcaaatcgcaaaaatgcctgtgctcaatcatgcccgtatcccggtgaatgaccatcatccgggacgcggagcggtccggaaggggacgatccgctatcagttcttccggcagcggataatcaaaatcaatggtgcgcacggccaagtgcattgccacgaatcctccgaaaggtcaatacctttaaaccgcaggtaacacaattatatctttaccctgcttcggttcatatggtatggaaggacacatgaacaacctgctgtcagcaaacatttccaacgcaaccgcctgggggaccattctggtcgtcgtcctcgtcatctttctggtcatctttttcgccatcatcgccaaattcttcaagacatggctgcgcgcccgtctggcgaaagcgcccgtctccatgagcaacatgctggggatgtggctccggaaagtgccctatcccctggtggtggacacccgcattacggccgccaaggcgggcctggacatcagcacggatgagctggaggcccacttcctggccggaggcgacatcgtggactgcgtgcttgccctgattgcggcggagaaagccggcattccgctgagctacgaccgcgcctgcgccattgacctggccgtgaaaggcacttccaagaccgtgctggaagccgtgcgcacctccatcaatccccgagtcatcgactgcccgaaccccagctccggccaaacgcgcctgacggcggtggcccgtgacggcattgcagtggcggtgcgcgcccgcgtaacggtgcgcaccaacctggatctcttcgtagggggcgccacggaggaaacggtggtcgcccgcgtcggggaaggcatcgtctccgccgtaggttccgccccctcctacaaggatgttctggaaaaaccggaggtgatctcccgtaccgtaagcgacaagggggtggatgccgccacggcgtttgaagtgctttccattgacattgcggatgtggatgtagccggcaatgtgggcgcccgcctccaggccgagcaggcggaagcggacaaacaaatcgcccaggccaaagcggaagtccgccgcgccgccgccgtagccacggaacaggaaatggctgcaaaaacgcaggaaatgcgcgccaaggtggtggaagcggaagcccagattcccatggccatggcggaagccttccgcaacggcaatctgggagtgctggactacgcccgttaccaaaacgtggtggctgacaccaaaatgagagattccatcgctcaaccggatacgcctccctcttccatcaaataaataaattccctggtttccggaaaggcctgctttttccggaaacctttatcctttatggatttactggcatacatgctcgcctccggaggcgatgacaatagcctgaaactctggttctggctgattgtcggggtgattttcctcatcaaaaaagcaatcgaattgttgaaaccggatgaaaaggatgaggaaccgtccgttccggacacggagaaccatcatgaaaaacgcgtaagggaagtcattgcggaaatgcgccgggcaaccccgcagccacagcaaacccaacctgccgcaccggcccgcgcaccgcggccctcagcccctcctgtagagcttccctcccccgccgtggcccgcaaaccgcagccgatcccggcgccggcggttgcacaacccgaggaaacagcccggcagacggcgcaaaatgtgctggaacgctacgtaaaagctacggaagaagcccggcaatccatgcgctctctttccgatgcggaacaggcggctctgcaacgtttgcaaaagagggagatgaaggaacatctgcccgaccttcttccgtcatcagccgcagtggaatctccttccctgaaaaattcccttcaccaccccaaatctctgaaagcggctgttctttatcaggaaatccttggaaaacccagagcattacgaagcgcatccttcagcggtgaataaagaatggcccttcccggaccatattccgttcagccgtcatgctgcccccctcttattcattctcccttgcctgaaaaggtaagcggaggtacccttcatcccgcaatgacagacacacctttgcagatagccggacgccagttcacctcccgcctgatggtgggaacgggaaaatttccttccaatgagagcatgaaagaagctctggaagcctccggcgcccaaattgtgacggtggctctgcgccgggcggatctgacgggttcccacgatcccgccgccaatattctggatttcattgatccggaaaaatacctccttctccccaacaccagcggagcgactacggcagaagaagccgtacgcctggcgcgcctggcggcagcagccgggctgcccaactggatcaagctggagattcacccggacgcccagtacctgatgccggaccccattgaaacgctgaaagcggcggaaatcctggtcagggaaggcttcaccgtgcttccctacattaacgcagaccccgtgctcgccaaacgccttcaggaagccggagcggcggccgtcatgcctcttggcgcccccatcggcaccaacaagggagtgctgacccgggaattgattaacatcatcattgaacaggctattgtccccgtggtggtggacgcggggctgggagcgcccagccacgcggcggaggctctggaaatgggagcggatgccgtgctcgtcaatacggctatcgccgcctccggctctccctccgccatggcggaggcgttcgccctggcatgccgtgccggacgcatggcttatctgtccggccttcccgccgtttcctcccaagctacagccaccagccccctgacttccttcctgcattaaaaggccgggaaaaagccccggttttctcccgcacccatgagtcaagaaactccgggaacatttttcgcaatctttctgcgtatcaggaattccaggatgaagcaggcggctacaaacagcacaatcaacggaatcaggtaaggctggctgaagaacatctggtaaaagaacgcccccagaataaacagcatcagaagaaagcccaggatgataagcagcgcatttccctgagtctctttccggagccgccaatgggcgacgaataccgccaggtagctgatcagaaaacaggcccccgccagattggcgatggctaccaggttaaaggcattcgtcatcaccagaatccccagcaaaagatagaaaaaaccctccgttccgtggccccagaaaggctgtttaaaaatagctcccagctggccgttgcgcgccagagcccgggaaatgtccagcatgctgaacatggtggcattaatggctgatgccgtggcaatgagagccgctacggatacggccatgaagccccacatgcccaaaaccggataggcggcctgcgctacggccgtttccgtatggctttccagggaagtagcgggaacgttggacagtactacgtaggagagtatcaggtacagggccagcacaaggccaatagccataaaaatggctcttggcagcgtcctggaaggatttttcagattgcccgccgtattggccatcattccgtagccggcaaatgcgaaaaatgtcaatcccacgctgcccagcaaaccgtccagccctttcaccggaatgggatccgcgcccacaggcacggaagaaccgaagctggcaagcattaaaaccgtcaaaatcaataatttgaatgccaccatgattacttccgactttccaacggccctggctccccccatattcaatgcccccagcagcaaaatagccacgctggcaaaaagggccgtggaataaatggtgactgccctgtccggtaaaaacaggcgggacgcataggctccaaaggatttggccaccagggccacggtaatgaccagcgttcccaggtaaataagggtcagtgcgccggacagggtcttatgggaaaaagcctcgttgaaataatccataattcctccggaaccgggataacgggaacccagtttggcgtaagtgtacccggaaagcagggcagcaacgcctcccagaataaaggaccaatatacgttttttcccgccatcagggtcgcctgccccatgagggcgaaaatccccgctcccaccatgaatcctattcctaatgcaatgacgctccacagggacagatattcttttggggccttcccgtacataagggatttagagatactacaggaatgaaacgttgacctttccgcacgggatgacacgtcctgcttattcatccgtcctgcagccccatcatgactattccggcacggctttccccttgaaccgtccgttgtcggcatgtagggtacggctgatgatcaaaaccgccatttttgattttgacggaactcttgccgacaccatacccctgtgccgggaggcttttcgccgcgctatccggaagctggacggcagaatattgacggatgaagaaatcgaacgccaattcggcccggacgatctgggagttatccagaaattgattcccgggaaaccggaactgcatgaacgcggcagggaactatttatccactattaccgcaagctgcacgcagacctggctcccgccccctttcccggaacagccgaattgctgagcactctccgcaacctcggcattcggctggccatggtcacaggcaaacgcctggaaagcgcagagatatccctccaattttttcatctgtccgaattttttcctattctggaaacaggctccccggagggaggcgtaaaaccggaccgcatcaaacgggctttgtcccgtctgaatgccgtcgcctcagaagccatctatattggagacgcccccacagacgtggatgcatgccgctctgtccctatccgcattctctccgcaggatgggccgcggaggcggacatcaacggcctcagggaaaaaaagccggactttctcctgacccgttttgaagacctggaacgtttcttccgggaacatcatgaaaatgaaggcctttaagattgcaatcctgcagaaaacaggctaccattacctaccccgttaatatcaatccttccatgacttttcagaaagaatccggaaaagagggcctgaaaattctgctcatgctcgccagcgtcattatcatcacggccgggctgcaggcgggaaaaccggtgctcctgcccatcgttctatccggctttctggcaatcgtcagttatccgctgacgacttttttcaagagccgtctttgcttcccgcactggctggcagtgactttcacggtcatcatggactttggcattctggtgggcctgggctatctggcccaatacctggggcaggatctggccaaaacggtcacggtcaaataccagcctcttatgatggagaaaatccatgaactccgcgctttcctgattgaacaggactggaacaacctggctgaccagatgcttcaggaacttccggacctgctcaacggccagcgcatcgtggcgttttccacaggggtgatggggcagttagcttccatgctgaccttcactaccctgattctgatcctgatgactttcttcctgggggaagccccccgcttccgggcgaacatcaataaactggggcataacagcgacacaggcatccgcaaattctccaaggccctggccggagtccagaaatatctcattattaaaaccttcatcagcgcagttacagggcttctggctttcctgctttgctattacatgaacgtggactttccgctgttgtggggcatcgtggctttcgccctcaacttcattcccaccttcggctccatcatcgcggctatcccccccacgcttctcgccatgcttctgatcagccctactgcgggcatcattgttgccggcggctacctagtgatcaacacagccctgggaaactgcctggaacccatgctgctgggacggcaattcggcattgtgaccagtatggttctgctctccgtcatcttctggggctgggtatggggccccatcggcatgctgctggccgtacccattaccatgttgattaaactcgggctggaaagctccaaggatctcgcctggatcgcccagctcattgacaaccctcccactcccagattccctctcccccctctccattccgggaaaaccaacgaaagcacaaccaaggaataatccatgcattcattcgcttacaaaaacggcacgctctactgtgaaaacgtcaaccttcaggaactggcggacaaggaaggcacacccctgtacgtttatagcaaacaaaccattttaaaccattttcaccgcctcagggaagctctggcaccgcttaacgcggaagtggcctacgccgtcaaggcctgctccaacatcgccatcctgaacctcatggcccgcaacggggcgggattcgacatcgtctccggcggagaactcttccgcgtcctcaaagccgggggagatccgtccaaatgcacttatgccggcgtaggaaaaaccgagcaggaaatccgttatgccctgagccagggcatttattgcttcaatgtggaatccgaagcggaactgcgggccattaacgccattgccgcctccatgggagtcaaggctccggtggccgtgcgcgtcaatcccaacgtagaggcgggaacgcacaaatacattactaccggcaaggctgaaaataaattcggcgtggacttcgaacgcattgaatctctttatgagatggcggcccgcgaacttccgaaccttcatctgaaagggttgcaaatgcatatcggctcccagcttacccaggcgaaacccttcctggaagccgtcaggaaagtcgcccccctggctgcttccctgaaagaaaaacacggtattgaatttttctccatcggaggaggcattggcatcgtttaccagggcacactggattccggcgttcaggaatggtggaatgaggactgcgcccagctcacgctgagcacttacgcccaggccgtcgtccccaccctgcaacctctgggattacacatcattgtggaaccgggccgtcttatcgtaggaaatgcgggagcactcatcacgcgttgcctgtatgaaaaaaacgggaaagccaaaacctttaaaattgtggatgcagggatgaacgacctcatccgccccgccctctaccagggctatcatgaaattatcccggtcagagaacacccctccgaatcctgcgtcacagcggatgttgtgggtcccatctgtgaatccggagacttcctcgcccaaaacagggacatgccggacgtgcgccagggagaactcctggccgtactgtccgccggagcctatggtttttccatgtcttccaactacaattcacggcctatggcggaagaagtcctggtggacaggaaccaatggaacgtcattcgcagccgccaaagctgggaagacctcatccggggagaatccattccggaataacacccccatcccgcccctctttagaatgcccttccagcgataaaacgaaggaggggtatttcctttcaaccgtactgaatggaaaacaaggcagaattttcaagtccgccaagccacgcggagcttctttccggaaacgccgcacgctacagccgtacggactccggcagacttatccggccgcaagtcacaatgattcgaacatgaacatgtcccgcaagagcgctgcaaccccggcgtgcgcctgagttcagccttgccctcctgaaaaaaaacacctatcatatccccgttatgccaatagccacaccagaacaatacattaccatgcttgaaacggccaaaaaggaaggctacgcctatccggccgttaacgtgaccacgatcgaagtcatcaacggcgctctccgcgctttttccgaagccaaaagcgacggtatcattcaggtttccatcggtggcggcaaattcgcctccggcagctccgtaggcaattccgcccttggcgccattgttctggcggaagcaacgcgtcgtctggctgaaaagcacaacgttctcgtagcccttcacacggaccactgccagcccgaacacgtggatactttcctgcgtcctctgattgccgaatcccgccgccgcgtggaacgcggtgaagcccccctcttcaattcccacatgctggatgcctccacgcttcccatggcggaaaacctcaagctttcccgggaactgctgaaggaatgcgccgaactgggcatcgttcttgaaatcgaaatcggcgttgtgggcggagaagaagacggagtggacaactccggccatcccgccgacaagctttacacttctccggaagatatgctgatgacgtatgaagccctcgcgcccctcggcaaattcatgctggccgccactttcggcaacgtgcacggcgtgtacaagcccggccacgtcaaactaaaacccagcatcctgcgggacggtcaggaagccgtggtagccaaacacggagaagcggctcgcatgcccctcgtcttccatggcggttccggttccgaactttccgatatccgcgaagccgtttcctacggcgtcgtcaagatgaacatcgacaccgacacgcaatacgccttcacccgcccgatcgtctcccacatgtgcgaacacatcaacggagtactcaagattgatggcgaagtgggcaacaagaaggattacgatccccgttcctatcttgccaagggtgaaaagggagtcgccgcccgccttcaggaagccgccgacaaccttatgtccgccggcaagaccctctttggcaaaatctaaaaagagttccctcaacgagtttaatgccatgcccggtttcttaaaagaaaccgggcattttttctggaaaaccccgccaacagggtaaggcgggaaacgctttcaccgagtatttatccctctgagacgacgggaaaacgaaccgttccccgctctttttttctgacctctgggcttctccgattacgggaccattaacccgcattcttccgcaaggaaaccgctgcggacatataaaacgatagccgcacaggaaaaaccggaattattcataacagaacaaggccattcctccgctcagcggaccgcagggaccccggcagcgcggctctatcccggcactgcttgaagaaacacaggagccttttcccagcgcctcaggaaccttaatttcctgctttgcgggattcccttacgcggtcattggcgttcaggatgcgcttgcgcagacggataaaatgaggcgtagcctccaccagttcatcaggttcaatgtactcaatggcacgttccagagaaaaaatgacgggaggggaaagctggatgccgtctcccttcgtggctgagcggatattgttcaaatgcttttccttgcacgggttgaccggcatatccatctgccgcgggttttcgcctacaatctggccttcgtaaatatcttcctgcggccccacaaacagacgcccgcgttcttccagcgctaccagcgcgaacggagtggaaacgcccgtctccatggaaaccagggtgccggtggtacgcgtggtgatgtccccggcataaggtccgtaatcccggaacaggtgggagaaaatgccgtggccggacgtcagattgaccagctcaaattcaaaaccgataataccgcgggtgggaatataagcctgaataaaagtatggcccgtgccttccctgcataccatgtcttccatctgtcccttgcgggcgtgaagaagcttcataacgccgttggcatgttcgtccggaacttctacgtacatcgtttcatacggttccgtaaggcggtcgttttcatccctcttcatgatcacggtgggacgggaaacgcacagttcataattttcacggcgcatagtctccaccagcacggcgatctgcatggcgccgcgggcggaaacggagaaaacgccggccttgtccgtatcctccacctggatggaaatattcgtccgcatttccctcatcaggcggtcgcgtatcacgcgggaagtcacgttcttgccgtcgcgccctccgaaaggcccgttgttgatggaaaattccatggaaatggtaggaggatcaatcgccacgaatggaaggggctccgtatccgcggaaccgcccaaggtttccccgatgttgacgttttcaaaccccgccacccctacgatgttgcctgccacgccgatggccgaatccgtagtgctcaggccggaatattcaaacatgcgggtcacttttccggaaatgcaggagccgtcgctctgatggagccacacggtgtcccctttcttcacagttccggaggtaatgcggccgatagccacacggcctacataatcgtcccagtcaatattggaaacgagcatcttgaattcaccctccggatcggcatccttcggagcggggatatgttccacaatcttgaataaaagaggagtgcagtccacaggaggttccccctccatggaattcatgaagtaaccgtcgcgggcggaaccgtacacgaaaggggcttcaaattgttcatccgtggcgcccagctccagaaaaagctccagcacctggtcatggacggcggcgggatcggcatgcggacggtcgatcttgttaatgacgacaatgggcatcagcccttcctgaagggccttgcggagcacaaaacgcgtctgggcctgcggtccttcaaaagcgtccaccaccagaagcacgccatccaccattttcatcacgcgctccacttccccgccgaaatccgcgtgtccgggagtatccacaatgttgatcgtgtatccattccaaaggatggatgtattcttggccttgatcgtgatgcctttttcacgttccagatccatggaatccatggcgcgttcctgcacggcctggttggcccggtaggcgcctcccgcctgcaaaagttggtcaaccagggtcgtcttcccatggtcaacgtgagcgatgatggcgagattgcggaacttggaaggatctgacattgcgcgcgagagctaaaaacaccggaaaataaatgtcaagtctgctccatgaataccgactatattttcagcgtttgcaagcctccctgccgccattgccgcaagcgatggaacttttattttcctccggtgaatttatagcttccccccctcctcaaataggagtattctgcttcggcataaataatttctcaattctagataacaatgaagatttggttagatggaaagctggtggaacaggaggaagcaaaaacctcggttttcgaccacggcacactctatggagacggcatttttgaaggtatccggttctataacaagcgcgttttccgcctggaagaccacatgaaccgcctgtacaactgcgcccattatctgttgctggatattccttacactcaggaagaactctccaacgccgtatgcgaaacggtcgcggcctccggcctgaacgacggctatatccgtctggtggttacccgcggcgtcggcaatctggggctcaacccattcaactgcaaacgatcctgcgtcttcatcattgcggataaaatctccctgtacgatccggacgtatatgaaaacgggctggccctgattaccagctccgtgcgccgcaaccgtccggacaccgtttgtccgcaggtcaagtcgctcaattatctcaacaacatcctggccaaaatggaagctgtgcgccagggtgcggcggaagccctgatgctgaacgacctgggtaatgtggccgaatgcacgggcgacaacattttcattgtgaaggacggtaccgtgttcacaccgccagttacggacggctgcctggacggcatcacgcgccgggtagtgctggaaatctgccgggagctgcaaatcccggctcaggaaaagaccatgaaccgctttaccatcacctgtgcggacgaatgcttcctgaccggcactgccgcggaatgcgttcccgtgaccaaattggacggctatcagctgggctctggaaaaatcggtcctgtcacagctcgaatcctggcccgtttccaggaactggcccagaccacgggaacatcctgttagaaccagccaacccttttttgaaccaacgaaaacggctccgccagatgacggagccgtttttttgtgctattccgttaaatataaaaaagaaaacacaggtaagcacattcccgcggggctatacggcagtctcctctggaaatgaaggcttgtgaccttcacggcctcccgttccgaaacgctgcagaagaatccagtatgaaaagccgcgccgcttgtgaaatgacaaggcaagcgacatcttgcatgtccggccgccacgccggacatgtctcaacctgaaaaaaggctatttcttcttgggcaggccggtttccgggtcaaactgcttagcctgctgggcatgttctttcgtctgatagaaccgaacataatcaatcaggaattttacaggatacccttgcccgtctttaggagctttctcgcaccaggtgccgcccacggcggaattgagaatgagatagaacggcgtacggaacggattccccgccccattggcataattggtggtattaaggtcaatggacttcaccagtttgtcatccaccatcaacttgatggaatccttgtcccattccatgacataagtatgaaaatcatcggaaagattctctatcttcacagtccctccgcgggaagcatcccttttggacacgccgtccggactcaagtggaaagtggaataaaccacatccggctgttgggaaatattctccagcatatcaatctccccgttgacgggccagccccacttattcttgccaagcaaccagatggcaggccagatgcccttggttttgggaaccttggcacgcacttccagtctgccgaacatgaaattttttgtcttgatcgtcgtaacggaaccggaggtatagggcatgaacttggtattcttgatccaatccgcggaacttttcttataattgacattggcgaacttttcaaaatgggtttccaaaaccaggcagccatcctccaatctcatattcttgggtcggcctgtataagtctgctgggatccctggttacggattactcccaactccggtttccactttttggcgtctatcctggaaccgttgaactcgtcaccccagacataaacccacccgccggggagggtcctcggaggtttggaatcttctccctttacagacatgcaaaggcatgcagtcaacaacacggcaaataggctcttcatacggagcaatactgcacctagttccgtagcctttcaaacaaaatacatcattcggcgcctcatacctcctttcccctgtcaaatggcgaaatatcctgcaaaatgaatagaacccttaacccggcgcatgctatggtcatgatatgaaaaccactttccctccccatggccgggcgctcctccaccagacgcctgcaggtgctgtcgtgattgtggaaaacggcacagccgtcacccatcttttcttcagccgcatggtacagccggagcatttggaatgggaggaaacacccctgctgcgtcaaacggctgaccagctggatgaatattttcaaggttcccgccgcgtatttgacgtgccgctttctccccagggaaccgaatttgaacgaacggtctggaaagcccttcaagccatcccctatggagaaaccagaagttacggagacattgcccggcgaataggacgcccatcagcatgccgggcagtaggacaggccaacaaccggaaccctgtcggcatcatcatcccctgccaccgagtcatcggagccgacggcaaactgaccggctatgcaagcggcctgaccattaaacaatacctgttggaattggaacagggctccaccactcctttcacattattcatggatatggaacgcatgcccggaaatactccggccagtccataaaacggcaggactggaaaattccggtcagagctgcataccgttttccgtctgaggaagaggcatggatttcaaggcggccttgggggattcaatacccagccattgaagaggcagcaattcacccgttaccctgtaatgtttgtaggttaatccggcaaacacagccagaaaaaatatcaggacggcataaagggccatccataaataatgattccgggtcgtgcgggcggcttcatccgccaactgctgtaagttccgcatagcgatcgaaggggcggcatcttcttctctcccggatgattcggcagaaaatcccggagatggctcttccgcaaaccggagcctggcatcccccaaagcgatttcatcgccatcgtaaagggttgcggcgcccatcggcgtcaggccgttgattttagttccattagtagaaccaaggtcctccaggacatatcccccttccttaaactgaagcaaggcatgctctccggaaaccgactgaaagggaagcacaatctcgcaatgctcgtcacgtccgatgcgtgcgaaatattcaccgttcttcggaagaactatgtttttttcagaaccgtcgggaaggtggatggaaaggcgtggcatgattcctggaaatcatgccacgcccatattcattttcaatccaaaagaccgtttgcccatcacgtataagaaaaatggcgatatccgcctttccccagaaagacagaattccatgcagattcatgatatgggttcatcctcctcaatttttatttttcccgcatactttcaaaaaatattttaagcaattatagtggcctccggggaagttttccataagtaatccactcattttaaaacattacatgaaatactgaatcaatttttttcctgattggaaacagaccttccgaaactgcgacggatcatgccggacacgaacactgcgcaaacgacaatcttcaagggggacaacttgttgggaatcgctaaacaggccattttcaaacataccgttttccgggagggccgccctcccggaacatagggattggatatacgcgcaaactgccgtcctgcctttggacatgtccttcactatctcgataatttttttatttgcctggagcggcttaaatcaaaagaactcaactgaaattttttctgctgtctggcatctgccgctcctcttctggcatggagtttattcaccctgggttcccttccccgtccgttacatgcagacgtctgcatgacaccaataaaagcggcatgtcgctgccgctgtccctgattattttaataagaggaatttttctcttcatttattactgtgaagacagccagcatggcacaaatcaatccggggcatcgtaaaaacatccggagttcccgtaatgattcgaaatcctctttcacgggaaagtcagcggcctacaccgtggaaaaaccgtgcagccctgcacatgtcttgcgttttgaaggaaaatgtttcatattcagaccatgtttgttgacaacatccgcatattcgccagggcaggaaagggaggaaacgggctggtcagcttccgaagggccaaattcgtgcccaagggaggcccggacggcggtgatggaggcgatggcggaagcgtcattctggaagtggatccgcacacgaatgacctgcgttcttttttttatgatccaaaattaatcgccacggacggggtaggcggacaaagcgccaagaaacatggcaagaacggcaaatccgtcatcgggaaagtgccccccggtaccattatctaccgcagcaatgcatcctccatggcggaggcgacctggctggaacgggaaggcgaaggcattgaactggaaaaaatagcggatctgacggaaatcggcacccggttcacgttgtgccagggcggcctcggcggcaagggaaactggcatttccgttccgcgaccaaccaggcgcctacggaagccgagatgggaacggaaggggaggaaggcgtcttctttatggaattgcgccgcattgcggacgccgggctggtaggctaccccaacgcggggaaaagcacattgctgggagacatttcggaagccaagcccaaagtagccagctatccttttaccacgcttcagcctatcatcggagtggtggaattcgacagctttcgccgctgcgttgtggcggacattcccggcatcattgaaggcgcacacaacaaccggggcctgggacatgaattcctgcgccacatcacgcgctgcaaggtgctcgtcttcgttctggacatggctggcagcgaaggccgcgaccccattgaagaccttcaaaatctccgcacggaaattaaactgtacagcgaagacctggccaaacagccctggttcgtcgtcgccaacaaaatggacctggaaggagcggaagaaaatctggctaacttccgcatgcgtttcccgaaagtggacatcatccccatttccgcgctcaatggagacggtatttcccggctcaggaacaggcttgatgagcttgtaggttataaattcatccgttaacttattcattcaactttctttcaacctttgacatgacagcccctctctccgtaacgacagcttccgaccagcttctgtgccgtatcgccggaattggagacctcttcgccattgaaggggaattcgtcaccgggaaggaaatacccagcggacacatcaacaccacttacaaggctacctaccgtaaaagcgacgggacggaagattcctatatcctccagcgcattaacgattacgtcttcaaagaccccaaagccgtcatgcgcaacgtggaaaaagtcacgcgccacatcaactggaaagtcctgcgccgcctgaaggattccgccggccaaaccctcaacctctacccggcccggggaggacgcaactacattgacatccccggtgacggcatctggcgctgttacaactacctggccggcacgcacacctacgacgtggtggaaaacacccgccaggcctaccaggcaggatttgcctttgggtccttccaggatttgattagtgacatgaatccggacgacatcgtggaaaccatacctggcttccatcatacccggaaccgcttcaaccgcctgatggaagtggcggagctggatccgcaggggcgtctctccacctgtctgcctgaattggaattcattaaagcccgagaacaggatgtggatcggttgctgaatcttcaggaaagaggtgttcttcccacccgcatcactcataacgacaccaaaatcaacaatgtcatgctggatgaggacaccgaccacgccgtctgcgtcattgacctggatacggtcatgcccggccttgtactgtacgacttcggagatatggtgcgcaccgtcactccgcctacggaagaagacgaagaagacctggacaaggtgcgcatgcgcatgcccatgttccaatccattgtagaagggtatctgaccgctgcccacggcttcctgacccaggcggaaatagaccagcttgccttttcaggaaaactcatcacgctggaaatcggcatccgtttcctgacggactatctggaaggcgacccatacttcaaggtctcacggccgaaccacaatctcatccgctgccgtacgcagctcaaactggtggaatgcattgaacaggaacttccggccatggaacaatatgttcagcgcgtcgccaggggaatgtccagaaaatagggaaaagcttttccttcttccattccaccacctccggggacggctatgccgtcccttcttttttatattatttgaacatggcggcccattccataatccaagaaacattacacgtaatagccaagccatgtttgaaataccagacatccaactcaatcaatatggcaagccggcaaggctcatgttcctggctccatatgcccccgacgctcccgatttctccaaaaaaccctacacaggcaatggaggctaccctcagtaccactacaacatttataaagccatccaggacataggctacgacgtcgtctcctcctccaaaccctattccgtccaattcgccaagggaaacgtggactatgtattctccctgatgaacaggttcgccatgtccaggcctgaaatattcatttcttcctactgcgaattcattcaggttccctacctgggcgccccgcccaacatccgcgccatagcggaagacaaatttctgaccaaaatggtattccgctccctggaattgaacgttccggaaggcattggactttccggagaaaaaggtattccggcccaggcccccttccctggcccctattttgtcaaaaagcgttttggagccgcttccggcggcatccgggaagacagcatctgcagctcctggaaagccgtgggttcatgcgcccggcgcctgatggaagaagggcacgaagtgctcgtggaacaatactgtgaaggcattgacgtcaccgttcccgtactgggtggggaaaaccccgtcatcctgggatatgtgcagccgaaatccgacaaaccaggcagcatcatcacggaagacctgaaactgcacgaccatctgggttatcagctggtctccgttcaggatatggagcaggacatcgccagtgacgtccggaaaatctggagcgctctggggccgatggactatttccgcatcgactatagaatcgacttcgagacgggagaacggcgcattctggaaatgaacatctgctgccacctgggcaaaagcggctccatctgcctggcggccgcagaacacggctactcccaggaggacctcctcaaatacattatcgcctacagcatggacaggcagaaaaacctccgccaatacggcacatggctcatctgatccgcagggaagaagcggttcgcattccggtcagaacaaaaacggcagttaggaatcaggtatccggctgattgcctcaaacacctcctgccagctttccatggaagcttcctgcccgcccagggccatgccccgctcacgggcggcagcggccatgtcttcccggtagtggggctcccaagccattttagtggcgtacgtgatgaaatccccggggcattcgcacagccatccggtcttcccgtgttccaccatttgttcccaccctccgcgcctgtccacaacaagcacactcccgcttgccatggcctcaaaacccacacgcggccaattctccgtcgtatcggtaggctgcaaaacgatgtggcagcgtcggtaaaactcctgttgggacaaagacttttgatcatggaaagtctccacccaatcgggaggcctgccagtcttcacctcgctccgctggtcaaaaccgagaaaagttcccctcttccggaccggagaagcaaaatgctcgtaaatatgccacgtatccttgctgaacttatcttcatcctgccgggaaatgtgtccggctccaaaccagtccgtggaacgccctgcaataaaaggaaaatctgccgcatcaaaatacggcctaaacgtcatgaaccggatggccgggtcgggatttaaagccctcaggcgaggaatgacgtttcccattacgttgctattttgataaagaaacagggaaatatctccacgcttcatggcttccttttccctgccgaaaagccaggtcatgcaattgacgaaaactgtccttctcgtccgttttcgtatcttcgggagagcagccagaaactcttcattacaaaaactgatgacgggagcccctgccggaatggcctcccaatcatagccttcatgcaccgtaacacccaaattcatcatctccggataaagctcggcacagtgtgcatttttctgggtggggataagatgcatttccatccccatctgtctccaaaccttaatctggtgataaagctcggctcccgcaccgccgtaaagggatggaaatccaacaatatagagagaatgtatcatttaattaatggatttatgtagaatagtcttgccgcaagattttcaaaacatttggactattgatattcagaaaattattcagatggaaatagaaaaaatgaataaaacaaatttaaaataaacaattccattaatcaataaacatttttttgcaaaatttgcactaaatatttttttgttctgttttaaataatattaatatattcctcaaactaaaacatcaatctccacaaaaagatgaaaccaataaaaaacctattcaatttaattattttctttatcagataacttttatttcaagaaattaattattttttctgagattcatcatcaaataattggcaaattcaatatatgcattttttatgattatttccatcgtttttttatctttgggatcaatagctatcgttctgttcttggtaaattttttcaaaactgtctgcaactaatcttttcagaacgtcttccggattttttcctatgaaatgagccaatatgcttctactattccaatcatatccatgtttcttcatttcattataaaattgattttcaattactttctttttatttaacaaaatcacggttttgaaataattacgttcactcttgttaattatcatttgatttataagaaaacactgaaaaagatatttttgaactatcttcggtaaatatttaacatcgaatttccgataaaaattcatagactgctccaatataaagtggttattttgatcacttaatatagaagaagaatacttggaattacctacagcacgcattaagaatgcagaagattgaagtatatacttttttaaatattcttgttcttttattgaaaaattgtttttaacatagtctgaatcctgataattattcacatcagaatagacactcatcgggaataataaaataaaaaacagaaatatttttctcataattttgattgatttaatcatatatctgtttacattttaatttacaatttctattgtcaacaaaaataaaagctgatgcaataataaatagaatgccttgaattttattctcttctacagacggtcctccaatagaagagttaaattgttgtgcacgctcatatgaaatttaaccatcctccacattgtgcctgtaaacgattttcacagtcatttaaacaatcttgcaattttttagaataattttcaatgtgctttatatatgcgtccatagcagctggttgtacccatggcatatctggacattgtcttcccaatatgtcaaatgtattgacggatgatttctgacaaaccaatataaattgttagttttttcttctttggcaggatctctactaatccacctgccattttggggattgtaataacggtaattgtagtaaaccagccccagttcgtcatcagcgtattcgctggaaaaccggaacggattgtcctctgcggcattcccttccatcctgagaatattcccatacgggccgtattcgtacaaggcgcggcgtcccgctctgatgccgaaaagcgccgtggtgtttttcaacaggtcgtgcgtgagtacaggttttccgcccaggttcccgtctcatcaaagaggctcatggccaggatgcgcgtggctgccggttccagcagatcccacagataggtttttcgcagtacggacatcgctgattccgttgtccaatcatattgtaatatggccttataatactattaattcaagattttgtaagaaccattggccattcttattgaatatttctgttccaatttagatctgctatattatattaaccattagaaagaatttgatatgcagtttcttccggaaaaggatatgaaagggacttttagatatcttcttcgaaatgtcgaatcagatatattccacatgatcattcgatatatgatgaatataataaagaaaattctatatcctcaatcttggggatagaacgataatataaattattatatctaattattcataattttatttttcaattttatacattcatctttataatcataaaacgaattattttccattagttttaatattcttcccaacaaattcttttcgctttcatttaaattcttataattttcaataacagcaccaattgtatatcctacaaatgaatcgatatttccaatttcatatttatgataatcaccaaaaaaatatttaatagttaaatttaaacatgtcggaaaataatacctaagaaaagatgttgaaaatatataatgcggcaaaattgttgtatcatattcaagtggcattaaatcatactcccatgaacattttaaccaatttattttatgaacatggacatattcacaaaattcaattacaggcagcgcaaaagattcagactttataaaatcaatgcatattttgaattgtttattatttggaagcggaaacacaggatatataaccttcattatatcaagaaaggattgataggacaataaattagtatccataatagataaaaaatttaatttattttttgactatgagaatttcataataattgattgagtttatcttggcaacgttttttgcccgctaaagcgcgctcaatttcatcattatgtgcattatctccaccattgaagcattcattatttatttttgttcttgcatcaatacagtcttgaaatctttttatatttctttctatttcatttttacacatatttttgtttttacaatgcattgatgaacctttgcacttacgaccaacctctttatttaattcactatgtctttgttttgaacaatttccatatctaggtttttgaggaattgctattggaactgtttctggaactgttttctttgtagtatccgagcttatttcatctattactttttcggcaactaccaccactaccgcaacagctacacctactgccgccgccgctaccaccgccgctcctataggattaaatagagcaatcgcaaacgcgaattgcccctgcacatcaatcaaaatagaaggtgtgttatacgcatatgaataaacattatctttctgtttctctataataggatccctactaatccacctgccattttggggattataatagcggtaattgtagtaaaccagccccagttcgtcatcagcgtattcgctggaaaaccggaacggattgtcctctgcggcattcccttccatcctgagaatattcccatacgggccgtattcgtacaaggcgcggcgtcccgctctgatgccgaaaagcgccgtggtgtttttcaacaggtcgtgcgtgtagtacaggttttccacccaggttcccgtctcatcaaagaggctcatggccaggatgcgcgtggctgccggttccagcggatcccacagataggtttttcgcagtacggacatcgctgattccgttgtccaatcatattgtaatatggtttcataatactattagttcaagtcattgtaagaacaattgaatattttaatctaatctaggttggcaaacattacattaattattaacaataataatagggaactatatatttaactagccaaaaaatatttgcaatattactctatatagcttcaatgcttttctcctctattaatagtgataaccaagtaacacattctttatagtcatatggattaagtccgctattctcctcgccaagatcaagtagccattctcggatagtttgcaactggataaaagaaaattttctaaagatatccaaatcgtcacgcattctaccgatcatattctgacatgtgcaatctactaagatatctgaatctttcaatttttgaaatttaatcagctcttcaaatgaaatataaataacagcaggcaaataatatctaaaagcctcgttgctgaaaacagaaaaaaaatcccatatattcttacaatcatcagcttgcagagatatccacgatttcccttgaatatatgttatatcttcaaattcattttcatctttaatattatttggaatcgggaatatcggaaaatttatttctaaatattctttttttaataattgcatttttcttctatgaattttttcacattttgataaattattccaagcatctttcgcttgttcttgatgagttttattcccacctctaaaacatttattattaatatgactcctagcactagcaagcattaaccatgctttctttttcatttttaatatatagcaacagtcatcgtccgtacactttccacttttaccaacctctttctttgctctattcactttgtcttgtaaatatttttgttctgattcggagcaatcaccaggttttggaatatcgggataaggcacggcaattggctcgactttaggaattacattctcagatatttttttaataactttctctgccgttcctggtgcaataacttcagtaatggctacggtggttactgcaacagctgcaactatcaatccaactggattcaacaacgccggcaatgcaaatccaaactttccttgtacgtctataaaagcgctggggaaatttcccacgtaaccatacaaattttcctgaggcctttccatcatcggctcccggggcaatcatccaaagttttagtagttccgaagaaagaactatttaaaatgattttttcaatatctgaatttaattcattaataaataatgaatcacatctaggtatatcattatttttcagattttcaaaatatgatatcattgagcaaaataacgagtatattttaaaggctattgaatcctcacgtggtaataacagtcccccaaaaactactccaaaaatttttgaattgtatccatatgcgacaataggagctccaggaacttcatttccatacgctccaaacaaattaatgataaattccaaattttctattgatacctgccgatcaatcatatttgacaatttatattgtttcattactttagtcaaagcactactgacgatgtcttcagaatcagaaatcataatagaatattgttccatcattttattttcaagaatgcatatataatgaaaatatattttattatcacacaaaaataaaatattatatttttttctttcttcatccaccgtcaaaaataaaacatcatacttatccggaaagtcagattttaaataaggatattcttcgagccaatactcatgataaaccaaaggaaaaatatttttttcttcacatgaaactggaatatatgtatccaaacttttatttattatttcaatatctgaactaattttttttattttgtgcaaagcactttctacagctacatccaacggggtaatattattgtttcccgcaaataaaatattattcgctgaaacaaaaaataataaaaataaataaaaaatattcatactcattgtcttattccattaataaatgttgcatttgtttttcctacaggcttattaggattatagagatgggtacggatattaccttccccatctcttacagatgctgtcataataattttaggggggatttttatattttcatctatgttaaaattacttccaaacccttcttttgcaatctttctgtcgttatcacttagtgaagcgtttttgtccggatgactatgagcataccctatcattttgtcgccatcatcacatgggggcacacttaagggagaaacttccctatgtccaccagaagtcccaacttttcctacataatatttacaatctttctgacaaatacgaacaccaaattcgacttttacaggcttatttttctttgtttttttctctatcggggtactgttccatttttgcagatcctgttcataacgtttttccatagcttctactaccattctatttgctaccgcaaatgcttccgattttttttcatataattgaagacctaatatatcacaatatattatagaactattatctgaaaatctgtataaattattactttcttcttctccaatgggatctctactaatccacctgccattttggggattataataacggtaattgtagtaaaccagccccagttcgtcatcagcgtattcgctggaaaaccggaacggattgtcctctgcggcattcccttccatcctgagaatattcccatacgggccgtattcgtacaaggcgcggcgtcccgctcggatgccgaagagcgccgtggtgtttttcaacaggtcgtgcgtgtagtacaggtcttccgcccaggttcccgtctcatcaaagaggcttatggccaggatgcgcgtggctgccggttccagcggatcccacagataggtttttcgcagtacgggcatcgctgattccgtcgcggcggcgtccagttccgcgatttgcaggtagccgtgatagatgaaccgtttcttcgacatcaggatctctccttcatagacggctttctcaatccgtctgttcagatagtcgtagcggcactccacccgcctgttcccctgaatgaaccttgccgcctggttcagggcattgtagaaaacttcccattctcccgtagacgtttgaatctttgtctggttgccgtcggcatcataggcaggcgcaaaagacgctccttcctcccgggtgatggccgtgtactggttcaggttgttggccgtgtacgcctccgctgacgcacccgaactttcccaagaggtgacgcggttgccgatgttgtcatacgcataggcgtatgtccctccccggctcatcgcatcggcgatcagttcgccgcggttgttgtagctgtagctgtgcgtcaagtcgggagcgggggtattgaagtagtccttcttttccgtgggtctccccagcgcgtcgtaggcatagtcggttttggccggatagttggcgctgccgggacgcagatagtcgattctggtcagcagatcccgtttttcttcccgggtgtaccatctccggagggtattggggtagtcgagcgtttccagcagtccgttgacggcgtggtagccatagacgaagggatcggcgccgttattgagcgagaccgtagaaagacgtccgcagccgtcatattcccaggccgtctgctggacaataccctctccataatgcagactgtagcccgaaggccgccccaaaccgtcgcgcaaatagttgagcgcgcttgccgccagtcctgccgtagtttccgattccgcttcattatattggttgtaagccaacgtccttgtgccggaatcgtccgcaacctgagtgagcaggttcaggtggttgtagacataattgagtgaaggagtcgcatcattgtgaatgacggagaccaggttgcccgtctgcggatcataggcataagaagtcgccagaggcgtttcctgcccgtccaccgtccgggcctgtcgtttaaccgccagcctgttccagtcatcgtaagagtagctttccccatggccgtcggcataggttttagccgtcatcaggccggaggcgtcgtcgtagctccacgccgtcatgtccccgtccgtccgttcccgcggatcggcagcgatggtttcccccggaacgcggaacgtcatgagggataccagcctgtccgcatcatcgtacgcaaagacggagggctggagggccgtaccgtattcggcggttttgcgtccccgcgggtcataagcgtagcaggccgtgttgcccaaagcatccgtgacgcaggagggagaagccgtggacgggtcatactggatggtggtcgtattgccggctgcatccgtcctggctgtttcacggccggcgatgtcaaagacggtaacggcggcattgccgcgggcgtccgtataagtctccgtgttgccgctggccgtataaacgcgggaagaggcggtcagaacacccgcatggtctttccgggatacggtgtacccgtctatgacgacagtttccgcaatgacggaagaagccggggactgcgtttttaccgtccgtctggccggagccgtgtattccgtccattgcagggtttcattgccccgcggatcggtggagatgttttttccggccagcgaggaggacaggaaagaaaccagctcggccgtgctttccgcatatgttgttccctggctgttgcagcgcgtgactgtggttacccggtacacgccgtcttcccgttgccggcgggcataggcgtactccgtgacgagggagttggcgggagtggggttctcggccagcttgagcgtggttttgacgatattgccaaacgagtcatagtcataaagcaaaggagccattccatccacctgctgccgcaaaagcctgttgttcagatcaaaaacgcgccggtcatgaacaaggcctccgttggcgttcgcccgggagacacgcaccatgttgccccttccgtccgtgacgttttgttccaccagctccggttctccctccgcccggggaagaagcgtggaacgaaccacgccttccgcggagtattccgtacgatagaggagatgcctctgccccgtgccgctttgttccagcacggttccgtccgcatggcggatagtgacgagcgtcgctcccgtcggcgtggtgacggtttccgtcaggccgtccgcactgtaggcacgcgtactgctccttcctaagacgtccgtttcctgcaccagctgccccagcagatcgtaaaccttgctttccgtcgtcgtcatggggccgacgtcccggcgcgtttgcaggattctgccgaaggcgtcccgcttgtagctgacgatggtttcaggagtgacgaccgtttctccgtccgcgacttccgaccggctgacttccaccagctggcgcgccgtattataggagtaggtggtcatgatgccgtcttcatccttttcccacaaggggccgcagcacatcatctcccgttccgtcactctgccgttgccgcgcgtacgcttaacccaccggttttccctgtcgtattcgtaatccgccgtatccgtcagcgcccaggttccatccgtcagcaaggcgtatttctcaatgcgcgtgttatttccctgagcggaaacgtacgtgactttcctcgtgctgtgccccggcacggcctgccccgctatctgcgtttccctggtctccctgtagagggcgccgtactggctggccgcttcatagccatagaccgtctgcacgccgctggcggactgcttcatcttcagcctcccccgggcgtattcgttgggcgccgccggcagccacgtttccgtcacttccatctgttctccctccgcacccaacgccgtggtgcgtttttccacacggcgcacatggttggcttccgtataggtataatgcgtatccgccagccgtgcggcgttcatagtgagcaccacgtactggtgcgcaatatccggatcggcatggtcggagcagcggtaataggtgtaggtgcccttccttcccccgcccgcccagggttccatccggacggtttcacgcccgaaggcgtcgtaggaccaggtcttctcgcttccgtcgggagccgtctcccggatcagtttgcccacggcgttataagcgtaagtcgtttcacgggcatagtcggttccataagcctcaatacggctggtgcacaggttgccgctgcggccctgttcataggtttcgcacacccgggaaataggagtgccgttttccccgcgctgcacggtagtgaagagtttccaaatccccgaagaaacctcctgcctttcacggatcgtgtaaatcgcgtcttccccttccccctgggacatgcaccaggcccctcccgttccctgccagtagcgggtgacgtaaggcgcgcgcccttccgcctgctccgtgacggtgagcttgccggtctccgcattgccctcaatggtgaaggttttaaaaggcgtccccgtaacggcgtaaagaccggtggaaacgtttttggcccccacctgctcgggcagataaaaggcgatcacatagcccgtattcgtcacgttctcaatattggccagaccgtcccacaggttccagacctggcggatgacatcatctgcgcttcggacgatgtccaggtaattggcaaaatcctgagccgtccatgaagaacccagcctgatccggtagccggaggccgcgcccaaagcggaaacggaagaaccgccgtagatgactgtattgcccccggcgttgctgaccctcatttccgccgcgctggcggaagccgagacaacacgcccctctgccgcggcatacgccatggaaacggaacccgtccttttccgcgagccgccgatggagcctgcactagccgcgccggcatagcagtaatagttggcgcgggtgcctccgttccggatctggaatgccatgtcagcccccaactcccgaccggaagggggcagaatacagctggccatgggatgcaggtattgcagggctgcgggcgtccacaacctggaagagaagtgataagccacaatttccagcatcccgtacggcacgccttccataccgcggaaggaaccgaagctggtgcgccataccatgctggttttccgcgtctgggcagttacccgtctgcctgcggaagagaaccttccatatgcggaggcggaggaaaccaggctgcgcacggcagacgtactgggggaaccgccccggttgtccatgcagtcatccggggaaaaaggattgtccggatcagtctcatcctcatccccgccgttgtcgccattagggcatggattgctggaactgctgttgggagaactgctgcttccgctgctggagcctccgcatggatcatcgtcgccctcgtcgttgttgtccactggctccgtttccgcctccgggggcacataggaagaagaagaacccgtttgccggttggtaatttccaccttcaggtcaaaggagaatttggcaatgttgttattggcattgggaatggaaatattgctatagtccacatgcgcccgatgcattccgggctcaatgatgaaagaagccgtctgcggctcgtaactgccgcctccgtactgtccgcgcgggccgatgtccagccgttcttctccatccacggtcaagttagccagatcgtcggcgcccatggtcaccttgcattcggccgtttcatcaggccccagctccctgacttcaaaatcccagtcccagcttctttcaaaagcgtccgttggcgcttgttcgtcgatcgcggagggagctccgctattggaattgctcatgcccgtcagggaattgacatcgttatcaaaggattgttctttcatggtttgaatcggattagctattgaaacgcaaacattgcatcatcccaatcttggaaaaactgcaataatttttatccgttccttatccataacaacaaaacctcctgtttcaacacgtccaacacgggatgccccctggcctcagccgtgttcaataaatggtaaaatttcttctctgcgcacttccgaatggaaaactctggcccatatggaaaaattccggaagcaacatatccaaatggcctttaactgcgcgccatgaaacacggcaatttttcatttaacatggattcatgaactcttcaacggaaaaagcatgatctccctgaattggaaaagaaatccaaaatccataaaaacggttatcgcctgcgggcatgttcagcaaccccggcatgtctgaatggagagaaagcaggataaaccaccactttcccagcctccacgcctgaatttacaaggaaagctgctccttcaaacgctccagcagattgccgcaaccgtcctgaagcagttttaccacatattcaaagccttcctgccccccataatagggatcaggcacttcttcatccggaaaacgagtcgtgaaaaaacacatgggcgctatcttgcctgcccactgtccctttttatccaaccgtttcaaatcccgcagattttcacggtccattcccacaatcaggtcaaattgttccaaatcctctttccgcacggggcgcgacttaagccccggatcctcatatccgtattttttcagcaccgtcagcatccggctatccggagggcagccccgatggtaaccgatcattccggcggaatcgctctcaatcaaatgttccagaccttgttctgcgaccatttttttgaaaatgatttccgcggcaggagagcggcagatgttgcccagacagacaaacaggactcggtaaggttcgggagcactcatggacgtcatttctttttcaggataggcaggcggcctccccatttcaagagggaagagtttctgcacgggaaacggaaacgcccgcgaatatggcatggggcaaagaaagaaactgcgccgctcattcaaaaataagattctcctgtgtttcggcttgcgttaaaggatgtccggctgtagattatcgcatggcagatttccctcttggattaagttttgatgacgtgctcctgctgccccgcctgagcgcgattcttcccggcgacgcggacatcagttcccagcttgttcccggctttgacatgaaaatccccgtgttgtccgcggccatggataccgtttccgaatcggaactggcgattgccctggcgcgggaaggcggcctggccgtcatccaccgcaacaaccccattgacatccaggcggccatggtttcccgcgtgaagcgttttgaaaacgcggttatcccgaaccccgtcacggtcaacaaggacatgacgctggaagaagtccaccagatcatgatggatcaaggctattccggcttccccgtcgtggatgccaaccgcaagctggaaggcatcatcaccggccgcgacatgcgcggcgtggacgattaccagaatgtccgggtcaaggatgtcatgaccccccttgcccgcctgatcacggcggctcccaccacgaccattgaggaagcgcgccacatcctttacacccaccgcattgaaaagcttcccctggtggatgaacacggtgtgctggccggcctcatcacggaaacggacatccagaagcgcgccatgtttgcagacgcttccaaggatgaacacggccacctgcgctgcggcgccgccgtgggtgtgggccccgattatctggaccgcgccaaagccctgatttccgccggagcggacgccctgttcattgacgccgccacaggacacacgacccgcgtgatggacgtggtttccaacctccgcaagctgacggaccgtcccatcgtagccggcaacgtggttacggcggaaggagcggccgaccttatcaaggcgggcgtgcaggccatcaaggtgggcgtgggccccggctccatttgcaccacccgcgtcatctccggcgtgggcatgccccaattcaccgccattcaggaggtagcctccgtggcgcgtcccgcgggcgtcaccgtcattgcggacggcggcatccgctattccggggacattgtgaaagccctggccgccggcgccgacctggtgatgctgggcggactgctggcaggtacggaagaaagccccggcaaggtggttcattaccagggccgtcacttcaagcagtatcgcggcatgggctccctgggagccatgcgccgcggctccggcgaccgctacggtcagaacagctccggcaagctcgtcgcggaaggcgtggaagcgcgcgttccgtacaagggcatgctggcggacgtggtattccagctcatgggcggcctgcgctccggcatgggttatctgggcgcacacaatctggaggaactccggaacaaggcccggttcgttcaaatcacctccggcgggctgaaggaaagccatccccacgatatcaccatcacggaagaacccgtcaattattcctgttaactcctccctcacatggacgacaagcacctcgtagccgtcattgacttcggctcccaatacacccagctcatcgtacgccgcgtgcgcgaactgggctacatggccaagctgtatgcgctggaagacctggaccagattcacgaacccggcgccgtcatcctttccggcggccccaaaagcaccacggacgcggacgccccggacattgactttgaatggctccaaagcctgaatgtccccgtcctgggcgtgtgctacggcatgcagctgctgaacatcaagcacggcggcaccgtaaaagccagcaacaagcgggaatacggccccgccgccctgctgccggaaacctgcgcgggcctgtaccgggacatgtccccttcctcccaggtatggatgagccattcggacacggtgcaccatctggcggaaggctgccgcgtaatcgcccgcaatgcggaaggcgtccccgtctccctccaatggggagaaaccaccttcggcatccaatttcatccggaagtgacccattcccatgaagggcgcaccatcctgcgcaacttcctttcctgtgcggccaatcttaaaaagttcgacatcggagactttaaaagggaactcatccgggaaatccgggaacgcgtaggcaacaggcaggtggtctgcggcgtctccggcggcgtggacagcaccgttctggccgttctgttgcatgaagcgggcgtgaacatgcgcgccatctttgtggataacggtctgctccgcaaaaacgaggcagaggaagtgcgggccaatttcgcccgtatgaacgtggaaattgaaacggtggacgcctccgaacgcttcctggcggctctggacggagaaagcgatccggaaaagaaacgccgtatcatcggaggcctgttcatcgacgttttctgggatgccgtgggagacgcggaaatgctcgctcagggcaccctgtacccggacgtgatcgaaagtgcctccaacgccaaatccaaggcctccgtcatcaagacccaccacaatcgcgtggaacgcgtgctggaactccaagcgcaggggaaagtactggaacccttggcggaactgttcaaggacgaggtgcgggaactgggcacctccatgggcatcccgcatgacattctgtggcgccaccccttccccggccccggcctggccgtgcgctgccccggcgtagtcaccaaagaacgcctggacatcatccgggaatgcgatgccattttcatcggcaatctgaaaaaatacggctggtacgacaaagtctggcaggcctatgccggcctcatccccgtaaaaacggtgggagtgaagggggacgaacgctcctatgaatgggcaaccaacctgcgcgccatcgtgtcggaagacgccatgacggcggactgggtggaactccccccggccctgctgagggagaccagcaaccgcatcctcaatgaagtaaagggcatcaaccgcgtcctttacgacatctccaccaaacccccggcttccattgagtgggagtaaagcttccgcaccctgttgacggccgttcagcagggtgcctccgctcctcctctccggtaacaaaaatcaagaaaggagaaaataatgactgaactggaaaaatgcatggcgggcgaatggtacgactgccatgacaaggtgtttctggaattcaaaaacaagacgcaccggctcctgatgaaatacaattccctgccttacgatcataaggaggaaaagcgccaggtgctcaaggaaatgctgggcagcgtcggcaccaaggtctccatcggccattccttcatctgcgattacggccgcaacatccatatcgggaacaacgtcaccgtcaatacgggctgcacgttcgtggactgcaacaggatcactattggcaacaatgtgctgatcgcccccaacgtacagatttacaccgctacacaccccattgagctgaatgaacgcctcactcccgtggaaacggatgaaggaattgaatacatccgccatacctacgctcttccggtaacgatagaagacagttgctggattggcggcggcgtcattatcctgcccggcattaccatcggaaaaggaagcgtcatcggagccggcagcgtggtcaccaaaaatattcctcccgacagcctggcggcggggaacccctgcaaggttattcgtaaaatcaacggaagtcgggaacaatgatcaagctgatcgcttttgatctggacggaaccattggggacactatccccatgtgcatcagggcatttgaaaaagcagtttctccctatgccggacacacgctgagcgaacgggaaatcacgcagactttcggcctgaatgaagtaggaatgatcaagaaagttgctggagaaaaatggcgggaagctctccatgatttctacccggtttatgaagaaatgcatcaatcatgcccgtctccgtatgaaggtatacgtgaattgataaaaaccttgcaaaaggctggcgtgcttgtcgccctgattaccgggaagggagacaaaagctgccgcatcacgcttgagcaattcggcatgcggaatttgttctgttccatcaagaccggaacggaagacaaaccaaacaaggcggaagccattgaagaacttctgcatgacttccgcttgaacaaagatgaattttactatatcggggatgcggtttcggatgtggccgcctgcaacaaagcgggggtgacctgcctgtccgccgcctgggcaacgaccgcagatgtcagcggattgaaaaaagccaacccctcaaaggtttttcccagcataaaggaattgacattattcctgtccattgagaaataattaggaggtcttttccgactaataaaaacattatgaaatttcataggatagttgttctcattgatgctgataataccaatctagctaatcttgaaaaactcatacaatacatatccactcgtggacgtattgtggtcaaaagagcttacggtaattggagtgaaaatttaaaggataagaaatctgcactacaacagtctggttttaaaacagagcattatttcaattgtgttcccggaaaaaatgcaacagatatagcattagctatcgacgccgtagatttattacataaaaattcttacgactcctttgttattgtttcaagtgacagtgattttacacctctttctatctaccttaaagaatcaggagtttatgtaataggatttggaaaaagcaatgcttctgaagcttttaaaaacggctgtgatgaatttaaagatatagaaaaaattcctactagtgaatcaaattctcaacatttgaagaataccgccccgtctgcaacaaaaaaagatcctttagagataatccataaacatcttcaacaatgtgcggtagacaataataaagacgatgggtacacatctgcaagcgatgctggtaaatatcttcgacagcacatccctgattttactccaaaaacctatggatacaagaatcttactaatcttttagaagactttcgcaatctctatgctattgaaaaacatccaattcccggtaataaaaacgctgttaatgttagctataaactctgcaactctacaaacaattcagaatcctgatttaatccgtatctgattccttccatggataccggcgccgtcatcctcacctcctttctctccaccattcccgtttatcttttctttgctacgggtttctatctgcgccacaagcaagtcatccaggcagaccacgacgcgcccatcatgcgcatcgcgatggatgtggcctatccctgcctcgtcttccacagtatcatgaagtacatggtgctctccggaaatgagacgctcagcagcgtttccttttccctccaggccatttcagccggggccctggaacttctgctgggcatcgcagctgcatggctggtcgctaaactgctgcgcatgcgcatcggcacgggcctgcgtacgttcaccctgacggcgggagtgcagaactacgcttttttcgtcattcccatcatccagatgctgtttaccgccggcaacgaccccacgctgggcgtccttttcgtccacaatgtagggtgtgaactggtcgtctggagcatcggcgttatcattatcgcaggcggtccgggcaacctgaacatgggcgtctttttccgcgggcccctgctggccgtcatcgtaggactggcgctcgcctggtccggcctgggaacctatgtggcccaaccacccctgatgaagacttttgaaatgatcggcaactgcgccacgcccctgtgcctgatcctgttcggatgttccatgcgggatttatggcataacatgaagtgggaacccaaacccatcatctgcggcctgctgacgcggctggggctggctcctgcactgctgctcctgatggcttatttccttccggtggatgattatatcaagcgcgtcatcatcatccaggcagccattccctccgccgtcattccggtcattctggccaaacgtttcggaggtcatccggacctgggcactcaaatcctgctgacaacgacggtggcttccttcctcacactgccctgctggctggctcttggttccaccctggtcataccattgtattaacgggataatggcgacatcaatccccggatgacctggaacggcccgcttgcccaacatcttccgcttttccggaggattccattcccggtgtcctgccccttgatggaaataaaaccagtctgcaaggttcggcggcggaacaatttccctgctgaaatatccgcatcctttccgtctccatcctgcattccatgctgaatgcttccctacctttgggttgactccccagtcggatatgtattgaatggattcatgaaatttcctgctcctctctgcgccgccctgctgccggtcctgttttcctgcgcggagcaggtttcccggattgaacacgttcgggaggtgcccttaaaaaccacggtggttcctgcggaagacgtaggcatgcaccgcacccaggccacctatctgctgcatggcgccgtctcccagcaacagcgccttcagcgtctgggtcaatactacttcgtcacatggaacgatgccaatccgcaacaggcggcaaccctggtcatgatgtaccgccagggaaagacaggttcaaccgtcctgacaaaatccatttcctatccagccgggagaaaaggcggcacgcaaaactccgttttcagattcatcggggatgaggccagagaaaaaggggaagtcctcgcatggaagctcgtcctgaaggacaaccgcggcaaaacgatttccgaacgccattcttatctgtggggggacgatcattgactcttcggcaaaaacaccgaagagccgtaaaatcacccggatatacaggatgagacctgcagtttccggcagtctcgccagcctccaactccgttaataatcctccggaatatgggcacgcttacgcttcctgccgtttggcacggcgtttgcggacagcgtcggcaagggtttccagcacttccacagtcgtctcccacccaatgcactgatccgtgatgctcttgccgtacaccaggtcggaactcaacggctgggctccttccacaatgttgctttcaatcatcacggcaacaacctgttcggacccgctggatatctgttccgcgatattggcggccacagccggctgtttgcgataatccttgcaactgtttccgtgggaacagtctatcatgatgcggttgttgatgccggccttctgcaaggcttcttccgcttcttttacatgatcttcatcaaagttcggccccagggaggaaccgcgcagaatcaggtggcaggacttattgcccgtagtggaaacaatggcggaaactccctgcttggtcacggaaaggaagcagtgcgggcaggaggaggaaacaatggcgtctacagcgatttgcaggctgccgctggtgccattcttgaatcccacaggcatggaaagcccggaagccagttcacggtgtacctggctttccgtggtgcgcgcgccgatggcgccccacgtaatcaggtccgcaatgtactgcggcgtgatggtgtccaggaactcggtagctgcgggcactcccatatcccccaggcgcagcagcagtccgcgggccatatggaggccgcggttgatgtcaaaggtatggttcatgaacgggtcgttgatgaggcccttccagcccacggtggtgcgaggcttttcaaaatacacgcgcatgatgatcaccagatccttttcaaagcgcgccatttgttccttcaggcgggaggcatagtccacggcagcctggggatcatggatggagcatggccccaccaccaccagcaggcggtcgtcgtggccggaaatgatgttctccgcattcttgcgggtcgtagccaccattttggcgatttcggtggttgccggataatccttgattaaaatggcgggggaaatcaggggctcaatgtcttgaatgcgtatgtcgtctgttttgaaccagttcatgtctggggcttattgagaggtttttgagagaagttgaaaagaaaaaaatacggtttgcgggctttatgcctgaatataccgcggggcctcacggccataagccggaagccccgcaaaatgaagcggccgcgcctcccgacaagaggcgccgtcatgcattaccaggaagtcacattgtcttccgtcaattccggattgttgatatggccgtccgccgtgctgccctgcttgtccttgccggtgctgtaaacggccacgttcttggtcaccatccgggaacctacctgaacacggggagtacggtcgtcagggttggcattcaaaatgatgtaatagggagattcccaaggatccatcaggcccacacggccgcggctttcaaaaaacaggccgggagcgccttccacatccgtagtcgtcgtattgaaataagccgttttcttgggattcagctttctgtcctcatccgcccggtgcatataattggtcaggatgctcatgatgcggctatcgtcgtccacggcggttgtcacgtaatactgtccgtccttgtgggcctgcttggtcatttcccggctgctccaggccacgggaacgcggccgttgtccagcatgtaattttccacagccgtctgtaggccgttgcagtcgcttcgcgccgtggtaaccttggatttttccatcacgccgttcaccaccgtcatggcgatgccggccagcgtcaggataatggcaatcaccacaagcaattcaatcaacgtgaatcccttggacttacggttcaaaaaaggtgtcttcatactttgccaagagtagcgcaattacagttcagggcaagcggaaaacaaccggcgccgtctatttcaaagcctgttcccggaacggcagcagacggaataaccccggtgcacaaacaccccggcgccttccggcagccggggtgtttaaaaagaatgctcctttagttggaggggacaggggtttctgcggaagcaggggccggagcctgagaagaagcggcttccgcctcagcggcgcgcctgcgcagctcctcctgctggagttcttccggcgtcttggcgggaacggaagcttcctgcctggcggcagccttcatcatttccgggctcaacaggctttccgaactcttaacgtgctgccggttgatcagcatgcccagccccaggcaaagaaccatgaacgcggttccgaagtacaccgtggcttttttcagcacatccgtcgtccgggcgccaaaggcctggtccgtaatggctgcgccaaaggcggctcccagcccttcctgcttgggcctctgcataagcactacgcccagaaggagaagtgatacaatcaccaaaacggcaaaaagcaactgaatgctgatattgagtgaatctgctaaaaaaaggttcatgagcgcggggagtatgtgtgaattcgaacggtttgtaaagtctaggaaatgatttcgttatgctcgttgcagacgattttcttggggatgatgggcttgtccgacaaggcaaaactcataatgaccacccgttcgcccgtcttgattaaatgggccgcaccgccgttcatgatgatgttccccgtgccggcaggcccctggagagcatatgtttccagacggttcccggacgtgacggacgccacgagaactttttccccgggccacaaatccacggcggccatcaaatcggcaggaatttcaatactgccttcatattgaacatcgccacgggtaatcatggcgcgatgaatttttgattttaactgctcaaccaacatgacgttcgaacaacaaacccccgatcgcccctccggtcaagccgtcatcctccattttacggttttctgtgtcttactccccctcctccagcgcttccgcggcatgggcggcatcccgggcaagctggcttttcaattcttccaaagaggggaatttgatttccggccttaggaaacggaccggttccacttccatctcccgcccgtaaatatcccccgggtggccgaataaatgcgcttccagcaaaagttcccccgtctcaccttccacggtggggcgcacccccagattggctacgcctccgtattttttgccggccacccgggcgcgcacggcgtaaacgccatggggaggctgtaacccgcaaccgggtcttatattggccgtggggtagtccagcaggcgccccagttggcgcccgtgaatcaccgggcccttccagcggtagggacggccaagcatgccggcagcctgtaaaaaatccgcctcgcgcacggcttcgcgaatccgggtgctgcttatgcgctccccgtcctgcagaatagaaggaacggccgtcacccggaacccgtagcggcaggacagcaggcgcagggtttctacattccctgccctgccgcggccaaaatgccagtcctctcccacggcaatctgagccacccggcaggaggaacaaagttccccaacaaactcttccgggctcatggacgccagcctggaagaaaattccagcgacagcaccgccttcacccccagctcttccatcaaggcaaatttttcagcatcttcccccatgatggcgggcggcacgctttccggcctcacccgggccagcggatgggtgcggaatgtcagcacggcgggaattcctccgtcaagagcagcccctttcaccgccgcggcaatcactccggcatgtcccagatgcaccccgtcaaacatccccatggcccagtgtacaggggcggcaaggcttttcaattccttgaattcccggtaaatgaccatatgctacccggcaatcagaatatccgccagctccttcaaggaaagcatggcccggaacagttcctccctgggcgcggttttcagggtgtccaccgtaatggcgcggtccagcgtaaaagaaccggacctggtgcgccggagggcgctcaaatgcgctccgcagcccaatgccttcccaatatcataagcataggatcgcacataaaaacctttggaacattgaacggtaaaatccacttccggaatggccacgcgtgaaattccgtggccaaacacttccacaggccgcggctcccgcacaatttcctgacctttccgggccagtttgtacagcggcaccccgtcctttttgatggcggaaaccatcggaggaatttgttcaaaagctccgtcaaaccggtcaaacgcttcacgcacggcctgttccgtcactccgtctacggaatactccgccactatttctcccatggcatcctgagaggaagtctccacgcccagcataagggttccggcgtattccttgtgttcgcacatcaacttgtcctgaagcttggtcgccttccctaccaccagcatcagcaatcccgtagccatgggatccagcgtgccgcagtggcctattttcttaattcccagggaacggcgcgcaattgccaccacatcgtgggaagtcatgtcccgcgccttgtcaatcaacaggacgcccgaaggaacctggatggaatctgaaacattcatgaaatcttctgtcggagcacgcgttccacttcttcccgcatggccttcaggatagtaaggcgcacttcttcaataggcccccggatacgcactccggcggccatggaatggccgcctccgccgaaacgggaggccagctccgcgacggatatttcaggcgtcttggatctcagggaaatacggatgcggggatcgtcctccgtttcttccagataagcggccagccagactccctgcacggaacgcagaaggtcaatcaggccttccgtatcttccggacggcttccaatccgggcttttgcctcattcgtcaggcaaaacgtgcaaatcctgccgtccggcgtcagcttcattccgttcagcgcttcacgcatcaactgcattttcacccacggcttttcctggtaaagctggcggttgatgtcctggacgtcaacgcccatccggatcaaatccgcagccagttccatgacggccgccgtcgtcatctggtactggaaagaccccgtatccgtgctgacggccacgtaaagggcgtctcgcatcaccggagtgacgggaacgcccagatacttgaaaaagtaatataaaaccgcccccgtggcgcattcgtccggcaaaacgcactgaacgtctccaaacagctcgttcgtccgatggtggtcgatgttcgcccacaccttcactcccgccaaagcctccaggctgcgttctcccagtctcttgagcgcgccgttatccacggaaatggctacttccacatccaccggctcatcaggcgtgggaataatattttccacacccggcataaaggccagattggaaggcaccccgtcctcgttcatcatcaccaccttctttcccatttgcttcagggcttcccccaaagccagcgtagagccgatagcgtcgccgtccgggtgaacatgcgcaattaccgcaaaactgccgtggctgcggatcagatccgccaaaggcgcgaattggggacaatgtttccaatcttccatatgcactgccgtgtttttatagaaaaagccgcacctggacaatcaccaagtgcggcttgaaaagtcgtacttaatcccggaagaggattacttcttggacttcatgaccaccggagccacatccacggcgggctggttcaggtcattgaacttgggcaggggggtcaggggcggagcaccctgatcctggcagcagcaggaagccatgatgctcgccgcaaaagcggcaagagccataacggtaatcttcttcatatgcgtggttaaatgatgggtgataaaggatatggaaatatcttggagcataaaagcataccatgcgggcgcccgtcaatcaaatttgcgaaaatctcccaaggagacgcctttcccaaaatggcaagacgcataaatcgctcgcccggggttatctgtaattataatctctgccaagctgtatccttttcatgcccttttccgtcaaaatactccggtttttcggcattctcctgctgagcctctgcgcgctcggcgtagccggcatgacctgggcgtacctggtagaacccaatcttctgtttgtcaggaaagtggactatcgtgtcccccagtggaaagggaagggaacacccgttaaagtcgttattgccggcgatttgcacctgatgcccaccgcgtttgatgaagtgagggccctgcgctatgttcagaggatcatgcggctccggccggacctgattctgctggttggagactatgcccggggaagcagcgaaaacgccagcatggatcccgctacggccgcccggctgctgaaaggcctgacggctccctgcggggtcttcgctatccagggaaaccatgatttcaccttcggctggaacaactggagcagggaactgaaacaggcgggaatcaccgtgctggaagaccagagctctcttgtcacgttcaaggacggaaggcagctccagctttccggaatattggatacgacgcgcaatgtcagaaaacggctgcccaaacgccagtcgccggacatcccccatttcctgctttcccaccgtccggaaacggagcacatactttcccatggagacgtggacatcgtcatcagcgggcacacccacggtggccaggtttgccttcctttcggcctcctgcggtttgaagccagcccggactatgccctaccctacacctatccctggcatatctccggcggcaatacctacctgatcaccaaggggctggggacaagcacactccccctccgcttcaactgcccgccggaaatctatctgctggaactgcattgacccattcctcccgttaaaaatgcagtcccttccttcccggttccctccccctccgctccacgccggcggcaatccataaggaaaacggaaaagaacggccgggttccatagtttcaaaggatccggttatcaaacccttccttcagccttaaaatctttctggccgtcatccggtaaacaggccggtaaaggtgctttttcaagacggccgggagcgttcttccgggcagcggaccgcgcagcagcccggcttcacgcataacccgttcgtaacgttccccttcataacgccaattatatcgccagggcttgtgcactccctggtaatgaagaatgcccggttccaaagccgcttccaccgcctggcgcggcgtgacgccgcgccagaactgttcccggggatcgtttttcaaaatgcggcgcgtcaagccgtcatgccagttccagcgcgggtgcagcggcacagtcagctcgcacagggctccgttcaaggcatcctggtccggacatgtcagcctgtcccggtgagtgacggcataatccagcacagccctgaccagattcctctcccggaagacatccacattcatcagcagcacgccggaattgaaatatcccgtgcaggtcagcggcatctcaagacgttcgttaaaatgggaaccgggtctggaaaaattctcaaacaccacccctactgcttttccgtccatattcgtccggaacagctctgtcaaatcccggcaaaccagaacgtcaatgtccagatacagaatattgccccgctcttccttcaataattccggaatgaacacgcgtccccaggctggcaccggccattgttccgtatgggggaagtcgtgctcttccaaaatgccggaaacgtctatgaactccagacggcaatcgaacggagcggccagccgctccacgctcgcccggttctctccgtcaatgccgtcggaaagaacgtaaattttgtaaaaagtctccggataggcagtattcagcaaagaaaagacagtaacgctcaaaggcagaatgcccctgttgtcactggccaggacgacggcaaattcattctttttcatcggattattcattcgggtgatgtcagcggcgcagcaaccgggctcccgccttgcgcattttcttccagtaataggaaaagtccaagccggattttccgcccatccaggctttcagcaattttccttcccggcgggacaggcaggcatcatcctctgcgggacggtacagattttcctgacggagcatatcggccaccttccgggtaacctccttttggacggcatgaggggcatatttgcggatgttcctcacgcccattaccagcattttcaaaaatgccgtcctgtattcctcaagaatcccggcttctttccattccttcagcaccagttccgccaccgtcaggtaatccagcgactggagggaactgccggacgcaaaaacgctggtaatggatccggcccgcttgcggtaaacgtaagccgccctgctgacgacgcaaaccctcctgcaccatggaaaaacggcgtaatggaaatacaggtcttcacaggcaacgccctcggggaaccggatgccatgcttttccacaatggaacgcctgatcatcatgccgcccgctccatgatgtattttcccaatggtctctggagtgcagggaagccaccctttttccggaggggccatgtcctccggcagaaaccggtcctcccggtcgggggcggactcgtaataataccggaacccgcatgccagcctgtcggcatccagcgccttcgcacggcggtacatctcctccagcaaatccgtttccagccagtcgtcggaatccaccagaaacagatattctcccacagcatggctcatcgccagattccgggagcgggataggccgccgttttccggagcctgcacgaccttcacccgcgggtcccgctccgcgaattcccgcagaatggacagggagccgtccgtggaagcgtcatccacgcaaactatttccagctcacggagcgtctgtgagcaaatgctttccaggcactgggccaggtacggctccacattgtaaaccggaaccagcacggaaatgttcacgggagccgtcatgagccatgcggagaatctgccgctcttatttgttcaaatccttcctgcggcggcagaaagggctccagcgcgaaccatacctggtccactgtaatttcctcaatggcgccgggggaaaccaggttggaaatgcaccgggcagtaatggcggaattgcgcgtccggtggcagaaaatggcggtcacgggcaccccggcataggcacacatatgtgtaggccccgtatcattgcctacacaagccagggaacgcaaagccatctggggaatatccatcagggaagacttgcccagaaaactgacagccaggggagagctggcggcaatggcctccacttccgcagcctccgcccgggtgccgatgacaacggaggacacgccccgcgccgccaggcgtttcgccagggcgcagaaattctccacgggccagcgcttatagggatggttgggggaacagcccggaatcatcatcacatagcgttccggaagctcgtcaaaatgcagcccctccccgtgcatgaaagaaagatccgtcaggacgcgttccaaacggaacggctcccgctccaccttcccccaccggaaggatttctttttcagcaatttgcgccgttctccggaattgcaggccacccagtccatgtcatggttcagcaggaagcgcacggcgggataatagcgtttcctggtgcgggaagattcttgaagatcgtacaccacgtcaaaattccctctcacaatggaacggacggccctccaggtggcgcccagcttccagtaaggtaggcgattatccacaataaaatcgtcaaacactccgagctgctccgccatgggaacaaacattcccatggtcatcagggtgatatgcgcctccggatgaagttcgcggagccgcttcatcgtccccatggcgagcaccacatcgccaagggctccatgcttgatgatcagaatgcgctgtgcgggcatgggagaaaaaaggaatacgggttaaacgtaactgtcttccctgtccagatactcctgcacgtaccggcgcacgccatcctccagggaagtcatgggcgctgcataaccggcagcgcgcagcctggaaaggtccgcctgcgtataatactgatatttccccctgagctcttcaggcatctcccggtaggcaatcttttcctgaaggcccagcgcatggaaggccgccttcgccagatcgtggaaagagcgtgccttcccggaacctacgttgaacaggccgctcacctccggatgctccagcagccaaagcaccacgtccacgcagtcgcccacccacacgaaatcccggagctgccatccgtcacggtagtcgggatggtaagatttgaacagcttcaccgtttcattggccttcacttgggggaatatatgggccaccacgcttttctgcccgcccttatggtattcattagggccgtacacgttgaaaaatttaagcccggcgtattgggggggaaccggacgcccttcttttacttcccgggccactttacggtcaaacagggccttgctccagccgtatgcgttcagggggcgcagcgcgttgacgtgctccagggaggcgtcatcgtcaaaccccatggaaccgtccccgtacgtggccgcggaggaggcgtaaataaaccgtttgccgtacagggaacaaaactcccacaaatgccagctcagcgtgaaattcgtccggataatcaaatcggcgtccgtctccgtggtggcggaaatggcccccatgtgaatgaccgcctccacctcatccgcatgcgccttcatataatcaagcatgccttccggagaaaccacggcgcacagctctctcttggcaatgttcctccacttgtcggaagagcccagctcgtccaccaccacaagatcctttttaccggctttttccagagcggcgacaatgtttgagccgataaacccggctccacccgtgacaataatcataagaaaagaatcaataaaaaagttgtacggccttttgtaccacatccacccgtccctaggcaactgccatttgaggcgttccccggctcccaattttcaacgaatttacaatccggacactccaaaccctgaccgttccatgcggaaaaccattgggccgcaatccccgcgcagcttgcggagggtacgcccctcaaatcctcttttcatactggcaacgttaaaaaatttcggtaagacctgtcttgcaaaaattatcattgaccacggattgtaaatccgttacacacattcccacccctatgatccccgatgtttccatcattgttccctgctacaatgtagccgcttacgtggacagctgcctggagagcctggtacgccagactctccggaacattgaaattatctgcatcaatgacggctccacggatgagacctggacacatctgctgcgctggaaagaaaaggacagcagaatcatccttctgaaccagcggaacgcaggcgtctccgcagcaaggaatgcagggctggatgccgcccgcggcctttatgtcggttttgcggatccggacgactacatggatccggaaatgtattcccgccttttttcggcggctctggaatatgacgcagacatcgtggaatgcggcaaccatgtttttgaagactcgtcagaccggcttatcgaagccaaaagaagatcaccctcccggcattttgaagagaacgcctctccggccagcttcttccgggattccatctgggggaaaatggatatctgcgtgtggagcaaactgttccggaaaagcatgctggacgcccaccgcctccgcttcaacgtacatctgaaatccggcgcggaggatgaaaccttccggctgatggccgttccccatgcctcccgtctcctgttcattcccgactgcctgtattactaccgccttatgcgcaacggctccctctcccgccgctgcaacgttcccacctactccaaatgcgtgcaggaattccagcggttgctgtacattgtggactactggcagaaacaaggatggcagaatgaaggcctgttcgcttacggcgtccggaaaatcaggcctttttttgtttccaagcatccccttttccatcagatgaccgctgtccagcaacgttccgcgctggactggtggagcctgttctatcagaaggcggaaggaaaacgtttcctctccgctctatcgggacgggacaggcaactggcggacctgttgaactcggcggaaccgatcttcaacggctgggggcgcattctgctggcagcctgctccctgcttcccggacaaaaaggacgttattactcctgcaaaaaaatgcttgcggaacatttttcccaagtctgccccaatgggtttcaaaaagaaaacgcttctctggaagagccgtttgacacatcgccgccttccctgtaaattgccttatcctcccattccggatcaatgaaccgttttctctcatttgcagactcccgcatgtcggccgccctggagcggctgggcaggcaggcggaagcgctggatttttttgatgagatcacgctcttcacggaacacgacctttccgcagaattcaccagccgcatgggccggtacctgacgccgtcctgccggggattcggatactggtcctggaaaccctgggccatccaccatgtcctccaagaaatggaggaaggcgaccgcctcctttatctggatgcaggttgccatatcaacgccaacggaacggatcgcttccgggaatacgtaaatatgctggaccgcgacagccgtggcatgctggttttcaccaacggacagccggaatacaaatggaccaaaggagatatcttccgccacttcggcgtttcccaagaagacaggcatatcacgcatacccagcaaattgcgggcggccatgttttcctgaaaaagaacccgctcacggaaagcctgatccgggattggctccatgtcttttacgaccatctgcatcttgcggacaacactccttccgcctcccccaacctgccgggttttgtggaaaaccggtatgatcagagcatcttttccatcctatgcaaactgaggggcatcaccaccctcgacggatcggaaacctatgcggaaaactgggaacagctctccttgtttccattccaggacagacgggacatgggaatcccacgggccgggaaaaagggatggctggaaaaatgcaggcagctccttctttcttccaaaagaaacggattaggaatccggtaaagcttccccattcggaacaaccgggctgcacgacgtttccaaacggggaaatttgacgctccacgaactgttttcccgtcctattccacagcttcatcccgaaaattcctttacccttcggctaccgtttccggaatgtaatgacggttatttggacaagctcttttcatttgatcaggaatgttttgccttcatgaaagcaaacatccctccattccaaaactccgcacccgcactatcctccgccgacattctcccacccctactcacagttatgccgtcaccggaatccggctttcccccattcataccggaatgaaaataaaaaggccatcatactgggaacagcctgccgcagttcatggaatactggcagcctggatttccccaaaacgtttttctttcagatttgtaggcttgacggcggattcctaatcctcatactttcctatgtggcttctcctcaatgccgaacaatatttcaagtctcccatagcgtctcggccagctccgccccttaccggttgagcgacgctctgaaccggcatattcccggcctgaaatccaccctgctgctccggaggcgcaaaggaattgacggcctggaaatccacaggacacccgccagaagggctacggacgccttgcgccgccatctggcccatggatttgacattctgctgccggaaagaagaaaagacctgcctttctccctgaatgtgctgggcatgggatttgacacggcccaaatggaaaaagccgatgtagtgcatctgcactggataggcggcagaaccgtggatttctcgcagctgcgccatatccgccgtccattggtctataccctgcacgacatgtttgcctgcaccgcgggatgccactgcaccatggactgcggcctgttccaggacgaatgccgcggcaactgcccccagcttggcgctccccgcctcttccgcaacattccagcgtggctgttttcccgcaaacgccgcgccttcggccgcatcctgtcccttaccctcgtaactccctccctctggttaaaaagggaagtggaaagaagctgcatgttccctggaagaaaaatcgtacagatttacaatcctgtggacacggaccttttccgtccggcggaagaccggaatgccatccgggccggcctgggcatcccgcccggagcgttcgtcatcgcctgcggcgcaaccggcctgttcaatccggtcaaaggcggccatttcatccccctggtgctggaggaactataccggcgcgggcaccggaaccttcatctcctgctcttcggcaaccaggaaaaaagcgtggactaccccttccccagcacaaacgccggattcattacggacatgaacaagctggccgggctttacagcgcggcggacattttcctgaaccccacgcttcaggatgtcctttccaacgtagcgctggaatccatggcctgcaaaaccccttccgttaccttccggacgggaggagttccggaagcggttctggacggaaggacggggctggtcgctccgcagggggacctgaaccaaatggccgcccactgcgaacggctcatccaggacggaaaactcctgcaaaccctggcggaggaaggccgccggcacgcggaacaaacattctcctaccccgtcattgccgcacggcacgccgccctgtatgaggaaacgctccgggaataccgttacgaagagtgaaaacggccggcgttcaaccgccggactgcctgttccagtacatcaggacgcatcttcctttgtcattgacaagaaaaagacgcctcatacactctgcaccgtttcaacccttctccccccatgaaaacgcttaaaatctcctttttacagtccactccggatttcggcagggaaggaatgcttcagcttctgaaaagccggtatcatgtggtggaagacgattccgattttgattacctggtcgccaccccctggttttacgtcaaccgggaggctttttacgattttctggaacgggcccccggccacatcaccgtcatgtacggctgtcatgaagccattgcaccggatttcatgctgtttgactattacatcgggctcgatacggtgcccggaagcgaccgcactgtcaaacttccctaccttcgccaccatttggaagaagtgcacggcggtaaggaaggcctggatgcccatgctctcctggcctccaaaacgggtttctgcaacttcatttacgccaaccgcaaatcccatcccaacagggatgccatgttccacaaactctccgctttccggttcgtcaattctctggggccccatcttaacaacaccccgggcgacggccaccgggcggaagactggtacgcatcctccatcagaatgaaaaagccgtataaattctccattgcctttgaaaatgcatggtaccccggctacaccagtgaaaaaatcgtcaccagcatgcttgcgggcaccattcccatttactggggaaatccggacatcagccgggaattcaatcccgcctcattcatcaactgccacgacttcccaaccctggacgacgccgcggcctatgtgaaaaaagtggacgaagacgacaacctgtggtgtgaaatcatgtcgcgcccctggaaaaccccggaacaggaagcccgctttctggaagagacggaaagggaaacggccaagctttacaaaatattcgaccaatctccggaagaagcgcgccgcaaaggtgacggaacatgggtatcctactaccatcgctttttaaaacgcggccacaggatgcagctggcatggcggcggctgaaaaaccgcctgcgccgttaaccaacgtttccgggcaattcaaccccatgccggatttcctctgtccgccttcccccgtccccatccacttccttccgcttcatgagcaaatgcttttctgaacccttttgttcaccttctccccaccaagccggaggcgccatccacggaacctatttcccgcacattgacggcctgcgtacttttgccgtgctggccgtcgtcctgtaccatttgcaggaagggatctgccctggaggctatgcaggcgtggacatcttctttgtcatctccggatatctgattggcggaggcctcatccgtagcctgaaggagggaacgttctccctgacctccttttacctccggagaatcaggcgcatcatgcccgcctacttctgcctgattgcggccgtgctggctttcggctgcgtcgttctggactgcgatgacctgcggactctgggccggacggtgagatccagcgcccttttcatcaccaacacgtacttcagcagaaccacaggggattacttcagcccggcggcggaagaaaaccctttgctgaacctgtggtccctgagcgtggaagaacaattttacctgatgattccgcttaccctgtggctgctctggaaattcagggaaaaagccgtcaaacccgttctatggggggcgctgggcctctctttcttcttcgccgccttccacatggggcatctggaacataacaaggccttctatctgctttactgccgcgcctgggaacttctggccggctgccttctggctctggctcccgccgcggaacagaaccggggaaccggatggctgcggacggcgggatgggccggaatcctgctcccctttgcctgttatacctcttccactccttttcccggatacacggccatcccttccatcgcgggggcggccctgcttatccgttacggaaaccatggctggtccgggcgtatcctcaggcacccgctcagcacgggcatcggcaaaatctcctactccctctatttgtggcattggccagttatcgtgtactggacatacgtctgtttcgatgaatgctctccctgggattatgcgggcatgttccttctctcccttcttctgggtttcctttcctggaaattcgtggaaacccccttcagaacgaccgtctcatggcaaactcccggaaaagcgtttctggccacggcagcagggtgcctcatgctgggatttgccggtgaatggctcaaatggacggacggcgcgcgggattactggcatgtagcggccaacagcatggaattccctgaatactggaaagggccggccttcccgccctccttcggcatcacgcctcccagccgggcggtggtggaaaagggcaacgccattcagcaccatcatccggagctgggggatgtgacggattacccttttgtcctgctgggaaaaaacgggcaggccccttccttcctgcttatgggggacagccatgccatggccagttcccccggatttgacgaggccgcgcggcttcttcagcgatcgggcctgttctaccgcgcgcgcctgtgtccgctgagcggcatctccggctccggagactcctcttccctgacgctcctgcgcctgatgtacccccattgggaacacaatatggaactaattctggactggctggaaaataccccccaggtaaagaccgtattcatccacaaccgctggattgaactggtgaacaaccaccgggatacgcgcctgaaacaactggttgcagacggcctgcgccacacctgtgcgcgtcttcggaaagccggcaagcaaatcgtgctgctgggtcccgttcccgaatggactttcggcccgcgcaagctcatgcggcgcaatgccctgctgaacgccaaccggacagaccgcctgctgggcggggacttcgacacgcggcagcgtccggtattcgccctgttggagcacatggaatccacaggcctgtgccgcttcattcccctccacggcaccttccataaaaatgggcggtggctggcggaagacggcggccaattaatgtactgcgacgacaatcacctttccccctacgggtccagaaaaatggtcggcgacatcatcgaccagcttttcccgggaatggaaagaacagcggccaactgacggaagctccgcacgggaaaacatccaatcctttgacattgacaaggcatgcaggccccctacactggcgccaggcagcaaagccttcgcgatggtcccggataaaagcccggaatatggaggccataccgcgcccccctcttcaacgcctgtactcccatgacggattcctcccgccccacacgcatcaaggtcatcagaaaatccatgaaggcctctccggatcaaacggaatccctgttgtggggcgactgcctgttctgcacggacgccgccatgacggattatgactgggttctggtatacgacgaatttcccagaattcccgtgggcaccatcaggaatgaaacggaaccccttctctgtcctccggaccagactatcctgattacggtggagcccccctccatcaaaatctacagcagggcatacaccagccaattcggcaccgttctcaccacccactccatccgggaccttccgcaccccgggcacaccttgggccgcggatgtcttgaatggctgtacatcaagcccatgcaggaaattctggaccagaaggaattcccgaagacaaaaatgctctccaccatctgctccgccaagcagcatacgcataccatgcataaaaagcgctatgatcttacgcgttacctggcggaccgtctgccggaactggactggttcggacacggcatccgggaaatagaaaataaaaccgtcgccatggatgactacaaatatcatctatgcgtggaaaaccatctggaaccccaccattggacggaaaaactgtctgatgcctttgttgccatgacccttcccttttacgccggggatccgttggcaacggaatgcttcccgcaggaaagcttcatccccatcccgctggacaacccgcaaaaagcccttgaaatcatccgcaaggccatggaggacggagaatatgaaaaacggctccccgccatccgtgaggcaaggcgcctggtgctggaaaaatacaacatgttcgctcaaacagcggcagtcattcacaaccacagggaaacgggaaccatacgccccggagccatgctgaaaggacgccacgttctgcggaaaaatccgctccatgcccttcgggaattgacggacacgctggcctataaaatcaggtcgcgcggcaggcgcggtggaaccggagcataacctggattccgggcgtgcggcaacgggggggggggcaagccttccctgccagtaaagaaaatgggcgtccgatcttctgccgatggccgcgcggctggaggaacggaaagcctccatgtgacggaaagattcaaaaggaacgctttccccgacacccagcctcctgcccattaaagcatgaacggctccgtcaaccctcttctcagggaatacaggatctggaaccctttaaacgacagggaaaccgcaaccgtatccgccattcctccgccacaccgcaaccaaggcggcaaataccgtcccgacagccccgtccggtctgaaatcgattcaaaccggacggaaaacaggtaattaataaaacggaaaaaccttaatctgctttgcgggaagcgtgcctcttggcccgttcctcctcccgctgcttcttcaggtcttccttcatcttggccttctcttcggaatccagcttgccgtccttgttaacatcatatttttcaaggagggcggctttcttttccgcagaagtcattctcttgggagcgtcttcctccgccatggaaggcatggcgaaagcaacggccagaacaataagcaaatacttcatgattaaacggggttcttgaataatccttttctactcccgcgcgtcccggttgtctctctttttttagcaatacatgcaaattccccggccatgccccttttccgccgcgtaaactcccccccggttaagccttcccgaacgggaaaaatagcggaatcaccactaccatggccagccccatgatcacctgcaggggaacgcccactttcacgtaatccatgaacgtatatttccctgccggcataaccagggcattgggcggcgtggaaaagggagaagcaaaacacatgctggtgcctacggaaaccgccagcagcagcggataggggctgatgcccatactcgccgcggattgcagggcgataggcgccagaagcaccgccgtagccgtattgctgataaacatggtcagcagggacgccgtgaaatagacgcccgccatcagggcaaacggcccgaatccccccagtccggccaccagcccgtgggaaatggcctctgaggctcccgtcttctccagcgctacggacatcggcagcatggcggcaatcagcacgatgctctcccagttgatcgtccggtacgcctcctccacattgcgcagacagccgcacaacaccatcaggacggcggcaatcaataccgccgccacagcaggcacccagttgaacaccatggccgcaatcatcagcagcataatgcctgcggccaggggggccttatgcgtcagggtcaccttggaggcctccgccaggggctggcccacgacaacccattcaaaagttttctcgctcaggcgcgcaatatccgtccaggttccctgaatcagcagcgtatctccgtactggagcttcacatccttcaaattatggaaaatgtaatggttgtcccgctggatggccagaatattgaccccgtacttggcgcgcagccccgaagacttcacgggcatgttgataagatccgagttccgcatgagcagcatttccgcaatgcctatctcgtcaaacttcaatttgcttttcaacagggaatccgtatcttccgacgtcttccggttaatcatctccgccccatattcccgggcaaaacgggccacgtcctcaaactcccccatgacataaatgacgtcgccccgggccaccctcgtatctgaacccgccatggtctggctgaccgtctgcaggaaggaatgccggccggaatgcctgcggcgcacctccacaatattcacgcggtaaaggtccggtatctgaagatcatgcagaggatgttccgtcagaggggaatcctccagcacccggaggcggtaaagattattaataatctggtactcgtctatcaactggctgagagatttccccttggcctcgtgttccgccctgtcgtcatggcgtcccagaaacctcctgctgagggggatcagcaccaggatgcccgtcacgatacagacaaggccgatgggggtgaacgcaaaaaagcccagcccctccattccggcctcctgaagctggttgttgacgacaaggttggggggcgtgccgatcagcgtcagcatgccgcccatactgctggcaaatgccatgggcatgagcagacggctcgtctggatgcctccgtccgcagccaggctcaccagaataggcagcatcagcgctaccgtccccgtattgctgacaaatgcgcctatgccggctgtaacaagcatggtcagcaccagcaggcgcaactcgctcctgccggccagtttcatgattctgccgcccatcatcttggccaggcccgtccggaaaatggcgcctcccaccacgaaaagtcccaccatcatcaccacaatggaattggaaaagccggaaagcgcctgttccgggctcaaaatcccgaacataatcaggcagagcagggaacacagcgcgacaagatcagaacgaatcctcccctggacaaataaaacggcggatactcccagaatgagaagcgtggtcaacatagcaataaacggcaggagtgaaaaaacggcaagggaggatatctaacatgaccggcatgtcttgtcgataggctgaacaagtcattcacaaaaccgtctctccgccggcatccggcagaaaaaacactttatgcatcctgctcggagaaccccgcttcctctttccttctccggtatcatggggatgaggaaacaataaaaaacgcgctctctgaaagaacgcgccataaaatgaaaagtggtgggtagagaaggattcgaaccttcgaaagcaaatgctaacagatttacagtctgccccctttgaccgctcgggaatctacccacttgaagtgatgtgcggcgaatgtatagggattcccgtgccttagcaagttttttttataaaaagtaggtcctcccagaagcagaaaccccatatgcaacagccatgccgccggaaggaaagcggatgcaggaacacaaggccggaaaaggcaattttcacgaatctcccacatataccggagcgcggctgtccggggaatccgcatccagttgctccagctggggcagaatgttctccatgctctcccatacggagggaacaatcttgattgcggttccaaaccggactgccatcatcagggcgtctgaagggcgggcgtccagctccaccagcttgtccatcacctcattggcggcttctatggtcacgcgggcataaaagacttcatccttgcggccgttgataagcaccagcctcacccggcattccatggcggataaaaagtgagccagcagggaagacgtgtccggccgtaccgggcgttccccgttcaggcagcgttccagggccatgccgtctgtcagctccatgaaaatgacgcccaccttgccggtcagaggatcacgcaggcacacacccgccccggcccgggtgtaaagcagggcataaggttccagagcaatcaaattttcatccggcatggcgggcggaaatcacatgttaaaaaccgggattaataacccgttccgtatagcgggcagccaccttgacgtatttttccgcccatttgtggttattatccgcggattccggccccaggtccttcaccaccttggcaggagaacccagcaccagggaattggggggaatgacggtacctttggtaatgagcgcgcccgctcccaccacagacccctggccgatgaccgctccatccagaataatggaccccatgcctatcaggcaattatcctccaccgtgcaggcgtgcagaatcacgccgtgccccacggttacgtacttgcctacatagcagccgaaatcgtctgccaggtggatgcagctgttgtcctggatattggagtaatcaccaatgacgatcttattgatatctgcgcgcagcgtggtatggtaccagacgctggcatgttccccaatggtaacatctccaatcaaatcagcgctttccgccacaaaagcggtatccgccactttgggccagaagttcgcgtaaggttctcttgccatataagtcatgtattaattgaagataagacagcattccagtctaaaaacgttcattccgcgggtatgccgcagccggaaacgaacacggccgaacccacccgaaaatgaaaggccgcaggcacctccgcactaattttcttcccggatgcccttcttgctgttcttctcccgcttctccgcatccttgcgcagggagtcggcttttttcccattacctcccttttcataatacccggctatcctccgctggatggcggcttccttctttaccttgaaataatcgcccgatttagtccggatataccggttgtaggaagattccgcctccttggccatctgaagcacggcctcctgatcctgggaaacgtactcgtaatattgccccatcagcgcttcaaatacttccgcgcggcgcgcataatccttcatggacttccggtacagggcagccaccccggccttgtccccgttttccatcaggagatccgcctgccgcttgatggcggcggaagtcaggtcgctgcgcccctcgtccgtctccttttccagtttcttcagatcgcgggcaacatggcgcttattggtggaagcgtccctcatggggaaaatatactcatcttccacgcgggcggccatggccaggtaatccggacgggaacggaacttgcgcttaatcatggccaccagttcatcccattcttccagcttcgtgccgctctccgggcggcccatcagagcaatcaggcgttcccagcccagggggctgccgggagtggcctgagtggcggcttccagcattacccgggcgcaatccggcttctgcatctcctcaaacaggtccgccagggaaagataatccagggaagtatccagccgggcgccattcaccttcttgtccataccctggagaagggtggattcatgctttgacttgcagttgtgcggatgggaaaaatgccccgtattatatccgtacccgccgtaggactgccaggtttcatccgtcgtcagcagattgacccaggcatgcggcccgcggttgccgtccccggtaacataggcggagggaatgccgttgcatttggcggtattcaccgcaaaataggcctggtccatgcaaatgccgccttcatccagaatctcctggaaggtataattagtataagggtccttgcccagtgcggcgcggtccatccggtaacggatcatggaataggctccgccccatcctttccgggtaaggcgcacctttttgcgcgcccaatccatctccgacctcggcagacgcacatccaccacaaacaacagctcggaagggcttaatttggaaatgtccgtgagaagctcacgggcttcatccatctccatgaagtactcgaatacctgttccagcgtcaaaggcgtggtggaaatattggtggaagaagacgccctcagcttggacgggctggaagcgatgcggggattcagcatggcgcaggccagcgccagggaggaatacctgctccggggcatggcggaggttttcatccagaattccgcccacttcctcaaaatccctccccactcctccccgggtgtctgctcccgcgccatcgtgcgcaggaaaagtctgaggggatcggaaggatctgaaaaaagccatggatagaaatacctgggggaactctccttgatttgttcctggatggtttccgctcccactttgctgatgagctggtacagctcattggcgcgcatgagatacgggctctgatcgtacatggacgcgtcaaatttgccgaatttgatgaccttcacggcatcccgttccagattggagcgcaggaaatcggcatacaagtcatagcggcccgtttccagggccagattgaaagcatccgtaaacaactttctgttggcggcgttattggccttcaggctgaccagaagaacaggcttcttgaaaatctccagccgcggatcttcctcctggaccacgggttcttccttcggttcctcaggggaaggctccgccacttccggttccttgttctgccgttttccggcggcttcctcagcagccaggcgttccgcctcaagacgggctttttcctccgcctccgcgcacgcccgttcctccgccttcctgcgcgccgcctccagttccgcggctttccgcgcacgcgccgctttcgcttccgcctcctttctggccgccagctcagcggcggcagccttacgttgaacggaaacccggtggtaagccacccctccggcggcaagagccagcaccaggacaatagtcataataattccgccggaagaggattttttatgcttgggaaaaccgggacgcagaggattgacaggattcatggggatgcagcttgaacgcgttgaagcaaattggggtgggggatgagacggttttatccctgttccgtgtgacataaaagcgcaatacctttccgaggtcaacttgaaacaatggtcttttgttgaaggctcgttttcccggaacccgttaagaatcaaaccagagtatttttccttgtattttcatagccattttatagtatcaggcctcttcatgtttccaaaaacatgagaaaaacacaagtatcctgctgattattcctggatgacatatgtttttcccgttgcctatgaacactttctctcatctcagtccgtttctggccgttatttcgggaagcctcttctccggaacggccctctgtaacgacatcgtgctgcctccgccagataaaaagggaggaaagcccctcatgcaggttcttcatgaacggcattccaccaggtcctttgcagacaaacctatcccggtggaagtcctgtcctccctgctctgggcggcgcaaggcgtcaaccgggacgatcccgactatcgcacggcgccgtcttcccggaattccaatgaaatagaaatctatgtcgtcctgccgcagggcagctatctttacaggccggaaacccaccggctggagaaagtggttcagggcgacatgcgggccgctacgggaacacaggaattcgcggctaccgcgccgttaaacctggtctatgtagtagaccagtccaaacagccgggagactttgatgccaggagaaagctggtcacggcctgcacggatgcggggtttattggagaaaacgtttaccttttctgtgcttccgaagggctaggcaccgtgttccgcgccatgattaacgccaattatatccagcagtgtctgaagctccccgtcttcaaaaaagtcctgtacgcccagagtgtcggctatccgtcaaaatcctgaaaaaaccataagccggaacgctgtgagactcgccgttccatcggcggctcttcctcatgcctgcgaaaaaccgtcatgggaaccgccgttcccatggagataaaaacgccaggaaccgttgccgggccagtcaggagcgctctcttccggacagcccggcaacaacggaaaaagcgtttggcgaactgttggatgaacgtttcgggcaagtccggttccgccactccgccctgcggcattggctggagaaatgttcaaaccggaattcccgggaaactgcggcgccaggaaatctactcctcgcttgcggtctttcccatagttcaaattcatggaaaatccggaaccgcaagcggaaaacgcaccagcattaccactggttgtccaggtttttggtatttatctttccgggttccttgttgcgttccttcatgccgcggacaggcttgggatccttttcgtgcaggtccagaatatcaatcacattctccccttttttcaggaatggggccggaacatacagccttaactgaggtcccacattccaatagcgccccacgttgattccgttcacccatacataccccttgacatagcgggacatatccagaaacgtgtcctgaggctcttcaatatttacaacggcccggaaatgcgccccttcccgtttctgggaaggcccctttcctttgggagcccgcacaatggaatcagctttcaggggaagcgccctcaccgtccagttctttaactcccgcgttcccagtttcacaggatcgtaaatccccttgcggtcactctccatgctgatatgaaaattaatatgccccatggcctctaccagaacttccagcgtccccggcttcctgcgctccggcagtttcacactcttctgccccagccgccgatccagcgtgccgaccagctctccatccagatacacctgggcatagtcattgacattggtaaattccagcgtttcaggcggtcctgacggaacggccgtgctgtaaacggcaataccctggttctggttccattgttcaaaatagggaggctgcgggaacttggaccggaaaggcttgggcaggttctcccaaaggccggcatgcactgcgggcgtgaactccggaatttccatggccggaatgtccgcgggaggttccggcacagcggcttcgggaggcaactttttcaaaatgatttccctcatctgggcataatattcattcatccgcccctgctcatccacgggagaaccgtaatcataactcgtcaggtccggctggtattttcccggccctccgttgttggctccggccgagaatccgaaattggtgcctccgtggaaaacgaacaagctgaaggaacgccccttgtccataaaccagcggacgtggttgaccactccaggggtgggagcccaattcccctccccccagtgccgcagccagcccggatacgtttccgaggaaaaaacgggaactcccggattgcatttattagccactgcccaatggccgtcgttcagccccggatccagccctacggccacgcctggaagcaccacgcctttcagaaaatgttctcccgcgccgtcggaggtgtaaaaggggccaaaacccttcctgctccagaacgccttcagccattccatatacttgcggtctttacgctggtagctcccgtattcgttttcaagctgggtcatcagaatggggcccccgtttttggctaaaaaaggctccgccacacgagccacggcctccagataacgcgtctgcgccttcatgaatttggcgtcttccgtagttctcaacttggccttgggatccttcagcaaataatgaggcagcccacccagatcccattccccgcatgcataggggccggggcggaataaaacccacatgccttccttctggcataacttgaggaacccttccagatcccgattgcccgtcttaaagtcaaagctgccgtccggctgctcatggtcattccagaacacgtaaaatgcaatagtattcaaccccatagccttggcggtcctgatgcggtgcctccagtattcccggggaatgcgctggggatgcatctccgcgccgcggatctggaaaggtttcccgttcagcatgaactcctggttcccttccccgccgaacccgaacacaacgggggttcctccggaaagagcgggtttctgtacattctggacagcctcagggccagcccatgccaatgctcccactccgaaggccatcagtgcggcagaccaactgaaaccatattgcttcatcatgttgaacagttaattcatttgaagacggttgccaataacaatttttttctctcttctccgaatcttcggaatacccttcccctccgccagaaatctgacggggccggacggaacggaggccttccgttccgtggaatgtaatcatgtcatatatcttcatccctttgtatgaaaaccggaggacgcctgtctaaattgatcaatatgaaaacaattgttcttcttcgccatggagaaagcacgtggaaccgcgaaaacagattcaccggatggacggacgtggatctgacggaattgggaatacaggaagccaaccacgcgggcgaccttctgaaagacaggggaatggcctttgaccatgcctacacctcttatctcaagagggccgtgaaaacgctcaactgcgtgctggaccgtttggaccaggactggctgcccgtctccaaaagctggaggttgaatgaaaagcactacggcatgctccagggcctgaataaaagtgaaacggctcaaaaatacggagacgaacaggtactgatctggaggcgcagttatgacgtggcacctcctcccctggcggaggacgatcccgccaaccccaaatgggatccccgctacaagggagtgccggacagcgaacttccgcgaacggaatcactgaaagaaactattgcccgcatgatgccctactgggaagaaacagttctcccttctctacggacgctggacaatatcctgatcgtagcccacggcaacacattgcggggcatgatcaagtatttgaaaaacattcctgacgaacagctgctttcccttaatcttcctaccgccaccccctatgtatttgaatttgacgactccctgaacctggaaaaagactactttcttggggatccggaagaaatccgcaaacgcatggcggccgtcgccggccagggaagcgcaaagaaaaaaacgcctgcggaataacctcactatcctttcctatgaccgcccattcctgccgcattgcgttctttgacgccaagccctacgaccgggattccttcaattctgtcaatgaacgcgaattccattacgacatccgttacttcaaggggcacctcactccggacagcgtgcccctgacccgcggtacggacgtagcgtgcattttcgtcaatgacacggcaaaccgggaagtaatacggaacctgaaggaaaatggcgtcaaattgctggctctgcgttgcgccggattcaataatgtggatctgaaagctgcggaagaagcggaactgcccgtcgtgcgggtgccccaatattctccctatgcggtggcggaacatgccgtagccctaatgctttccctgaaccgcaaaatacaccgcgcctactggcgcaccagggacggcaatttttctcttcacggcctgatgggctttgacatgaatggaaaaacggccggcatcatcggaacgggaaaaatcgccagaatcctcatccgcattctcaaaggcttcgggatgaacatcctggcctatgacctgcaccctgaccagcgctttgcggaagaagccggcattacgtacaccaccctggacgatctgtacgcccggtccgatatcatctccctgcactgtccccttactccggaaacggaacacctgattaatacggattccattggaaaaatgaaggatggagtgatgatcatcaacacgggacgcggcaagctgattaacacggaaatgctgattgacggcctgaaatcaaaaaaagtgggagctgccggactggacgtgtacgaagaagagggagaatatttctacgaagacaaatccgacaggattattgatgacgatactctggcccgtctcctttccttcaacaacgtcatcctgacttcccaccagggctttttcacgaaagaagccctgcacaatattgcggaagtcaccctgcacaacatccgggactttctggaaagcaaacctctgatcaaccgagtctcgcttcagtcacactgaacgtgcccggcgggcgctctacggaaatccgggactttctcatccgccttctgccggacagaaggcggaattcggggaaaggcggcagtttttttatgcaagcgccgccactgcccgccgtattatatactatgagcactccagccccagcctccgtcctggctcccaaaccgcactacgccgctctggatggcctccgcggggtggccgccgtcatggtggtcctgttccacatgtttgaaggcagcgccagggacttccagttccatacggaccagatcatcaaccacggctacctgtccgtggacttttttttcatgctgtccggcttcgtcatcggatatgcctatgacgaccgctgggaaaaaatgaacctgtggaacttctgcaagcggcggctggtgcgccttcaacccatggtggtcatggggatgctgctggggggaatcctcttttacttccaggggtctgaaatcttcccgaaccttgcgcaaacccccgtatggaaaatgctgctggtcatgaccgtgggattcacgctgctgcccgttcccgtttccctggatgtgcgcggatggtcggaaatgcacccgctgaacggtccggcctggtccctcttcttcgaatacgtcgccaatatcctttatgccatgctcatcagaaaatttaccagcagatggctggcggtcctggtctttctggcgggctgcgccctcattcaccagtgctacacgcagggcaacaacatcggcggctggactctggatgcggaacagtgccgtgtggggcttacacggctcatgttccctttcttcggcggtctgctcctgttccgcctgtgcaaacctggacggatcaggcatggtttctggtggtgcagcctgcttctggcgggaaccctggcggcgccccatgtaggaggcgcggaacatttccgcctgaacggcctgtatgacgccttctgcatcattgtcatctttcccgtgatagtcttcctcggagccagtgacatccctggagacatctcttccagagccagccggtttttgggaaacatctcctatcccctttatatcacccactatcccatcgtatatctctacctggcctgggttcacgatgcggaagtccctctttcccgtgcgctccccgtagcggtaggcgtcttattcctctgcattgccgtagcctacgggtgcctgaagctttatgacgagcccgtgcgcgcatggctttccaaacgcgtgctgaagcggcgtcctccggaacccggggcgtaaagcggaacaaacatctgccttgccccgggcggggccaggccggatactgtcggcggtctttcatggaaaaactgccgacatcctccaaagctctgcgctacctgccctttcttgtggcatcggcattctttatgcagatgctggatgccaccatcctgaacacggccattcccaccattgcccgcagcttcaacagtcatccgctgcagctccactccctggtaacggcctacatgctcaccgtctgcgtcctgataccggcctccggatggatatccgacaaactgggttcccgccgtactttcctgctggccatctccgttttttccgtgggctccctgctgtgcgccctttccgcctccgttaccatgatgacggtatgccgcgtcatccagggaataggcggcgccttcctgatgcccgtcgggcgccttgtcatcctgcgctcctatccccgctccatgttcgtcaatgtcctgaacattgtaacgattccggcgctgctgggcccccttctggggccggtgctgggcggtatcatcgtacagtacgcttcctggcactggatattcctgatcaatatcccggtaggcatggcgggcctgtgggctacctggaagctgatgccggacctgaaagcggtccgggaacagaaattcgactggccgggtttcttccttttctcctcctccgccgtcctggctacgatgggcctctcttccgcaggaggtataaccgataaaacgcgcatggtcatcctcacgtctgccggaggcattcttcaacttctgtactgggtgctggcgttccgttcaaaagcccccatcttcagcccggccctgttccgcatcagaaactttgccatcggaatcgccggcaacatcgtctgccgcctgggcggaagctgcctgccgtacctgatgccgcttttcttccaggtggtgcttggttattccgctcttcagtccggcatgtccctgattccgctggccctgagcaatctgctggcaaaaacggttgcgccgcgtctgctcgggaaatttggttaccggaacatcatggtcgtcaataccttcaccataggatcgctgctggcctccttccgctttgtaggccccggaacccatgaacttattctcctgggcatgctcgcgttgctgggcggggccaactccattcagttcacctgcatgaacaccctgacgctgattgacctccccaatgcagacgccagcagcggaaactccctgctttccacgatcatgcagctctccattgctgtcagtattgccgcggcctccctgctgctggacagcttcggcggccattcggctacctccggaaaggctgtggaaaccgcctttcatgccactttcgccaccatcggcgccattgccgcggccagttccttcatcttcgccctggtggacaaagacaagggaatcacccgcaaacggagaaaagcagcttgaagaagaaaattcccgcccctgttcaggaacaggaagaggaatctcccgtatcaagagaacagcactgcgcaaaccgggcgcgggactcttccagggtaatcggtttcttatcctcccccagggctacataaaccagctccgcctctgtaattttggcaatgttattgcaaagcttcgtcagacgttccgcatacacctccaccttcacggtgacggaggtgcggcccaccttgataatatccgtataaaaggacactacatcgcccaccagcacaggagcttcaaacgtcaggctgctcaccgcacgcgtcacaatatagcggctcaatgcatagcgcatggcggtattggctcccgcaaggtccacctggctcatcacccagccgccgaatacttccccgctctgattggtatccgccggcattggttccacgcgcagggcgggaacgcgcccttccggaagctgggcatgacgatatgtattttccataaataagaataattataaattgataaggacatgcttatctatcacagccctcttgtaaagggtaaaacgcggaagcggaaaacgggcggcgctggcacgctctgcgggaaaaagaaaacagcccggaataaactgctttcccatattgattaagttgggcaggcggatttccgtgtcttatcccggagcttttccaccatggccggtaaaggcggttgtccattactcatggatcgcaaccatgaatccaaaacaaaaaaagtggacggggaggcacatcccgcttccgactttgcctacgtacccgatccggaaaagccttccacctggaaactgccgattttcaacatgcgccacgtaggaggggccctggccgccatgaccagcgactatcgcggcaaccccgtggaaataccggaaggagatcgccgtgccgtcatgaaaaaaatcctggccaggaaagcgaaactggaacaggaagaaagctgattccgttttctttcatttctttttttccgcctgtaaacaggaaggaaagaaatatcttttcccttcgttccccggtcttagccgtttggggacgggctgacaccatccagataccggctttctgcggcgccttcggctggcacccccgtagaaatgaaagacattcccacccttccgacgctcctggcggatacagccggatatttcacttacggacggcatcaaaaacggtggtaaaacagaagaagaaattaaattattctaaaatcatcaatcatcccaaggatgtttttcccctaaagtggattggggaaattcaggaaatctgaaaatcaaataactttctccggccaataaaaacaacatttagaaaattcctatataaataaatatcaatggcatattgaaataaaaacatgtctttccctgaacaggccgtccgaagcctggtcatcacgacaggaatgaagaatgccggaaaagggaatgctgccggctatttcccgcatggcagcgtttttccccttccgtcaactccgcatcaaaatatgactgacgaaaaaatgagcacagaaggcactaacaaaatacagaacccgcgcggtgaattccaacaggaaagatatgaaaagcagcagcagaaagcccccggactgcaatccggaatgaagcccgtgccggattccggggaacaaagctaccatggctgcaacaggctccgtggacgaaaagccctggtcacagggggagactcgggaataggccgggcggcggctattgcctacgcacgcgaaggagccgacgtagccttgaactaccttcctgaagaacaaagcgatgccgaagaagtggcggaactcatcagaaaagagggccggaaggctgtcctgctgccgggggacctcagcaatgaagtcttttgtaaaaaactcgtcagggatgccttggaaaaacttggcggactggacatcatggccctggtagccggtaaacaagtggcggtggaagatatccgggacattaccacggaacaattaaccaagacatttgaagtaaacgtgttctccctgttctggattgccaaggaagcccttccgcatctcaagccggggacgagcatcattacctgctcctccattcaggcctaccagcccggcaagaacctggtggactatgcttccacaaaagcggccatcatcgcgttcagccgctccctggccaagcaggttgcccccaaaggcatccgggtcaacgtggtggctcccggccccatctggacagccctgcaagtaaccggaggccagctgcagaaggacctgccggaattcggacggaaaacgcctctcaaaagggcagggcaacctgtggaactctccggactatacgtctttctcgcctcccaggaatccagcttcattactgcggaggtctttggcgttaccggcggcatgcatctggcctgatgcggaaactcgcaatcctggaaaagggccggactgactttccggaatccctttccgcagcgccacacccccggatgaccgggaaagcggccggaaacggctctgcaaggaaatcagggcattgctccatttcccggttgtcctggcaaaaggtttctgcttgaatagggtaatggcattttggaggttttggttcatctttttccctttcacggcgcttctcttttccatggtgcatggcagtcctctgaacgcacccgtcatcacccttggagagaaaaaaagcctgttcggagaaaaagcgcaggccaatgaatatgtcagctatgccctttattactggccggaccccgccaatccggacggtccttacaaacccattgacggcaaaaagaacaaacggctccgcagcatggacgacagcggcaggatggccgctttcatcggcacggtctgcaacctgggacggcagtataaactcgacagggatccgcaggccgcctcccgggccgggcaatggctgaaagcctggttcattgctccggcaacccgcatgcagccccatctgaaatatgcccaaattcgccccggacaccggacggaaggagacggaggaggcatcatcgacctttaccgcatgcccgaattcctggaagctttgacggcgttgaaatgctccaatgccctaacggcagaagaatggaagcaggtgggcgcgtggctgaaccagtattacacatggctgactaccagcaggcagggcaggcatgcacacacgcgcagcaacaaccattatctgttttatgtggcgcaatgcgcccatttggcatccttcctgggccgcagccatgaagcggcccaatggctggcggaagccttcgccaacatgcaccgccacatcgctcccgacggatcccagcccgaagaactcaaacgggcggaaccctggcaatacagcgtttacactcttcaggcatggggatacctggtgcatcttgcagaacgcatgggcgacaagaactaccgttaccggaaaacacccgccgaggcttccattcaaaaagctgtggattatctcctgccttaccgcgccaaccctgaaacatggccctggcaaggctccaaggcaaacactccgctgcccgccatctttgaaccggagcaggcgggcaggccacaacggaaatgctcctgaaccgcgcccgccgttaaaagtatccgtttttcctgcttattgaaaatcccctctccagcagccacgaacggggcattttcccggaaaacgatttaataagggatctccccagtatttttccccttagatttttcctttctttttgctgctttccattcccacggagatatgggattcggctcagaccagatgcctttttgggcctttctggcatccctttcaagagaaacgagcttccggctggcggaaaaatttttataaatccacgcccatccttccttcaccatctcttcgttgacgaacatttttccatgccatatttcccctaaaatacggccgtacctgtcattctcggtataccggactgtaaccgtctctccccaaatcagcttttccaggtattccttggcgccttcatacccgtcctgccccctttccggcgtatcaattccctcaagccgtatccggtgcgtacgcatttgttcaggcgtcctttccagaaggatgaccgtgtcgccgtcaatcacgttaatcacgactcccctgatactttcagcaaaagccatgcagggacttatcaggaaaatcaaaagccatttcatgaaaaatgatataatccaaaaaatatcaggatgcaactactctttagagaaaccgttcccgcactgttcacacggccggaaacagatgaatgcggtcatctgtggacagcctgttctggaacaggccatcatgttttccggcatgaaggaacacaattcccgaacctattccaacctgtccggaacaacggtaaacaggctgtatcattgccccgctccggaacatctttattcgctgccgtgccaggagcggaagaacatcccgccggcgcaccccggcaatctaacccatgccgccatttaaaaagactgcacattaaacaagaaaaaccgggcgccctgcaacattcaatggcatggcgtgaggcattttactcattttttcaattcttcggctattctgccgaggttcttttccgttgcctttctcagtttctcctgctgtttccagtaccatgccgttctttccgacaccccggcctgattcgccagccaacgcacggcgccgctcgtgtcacagcctgttttcttctgaatgacttccagcagttgagcgacatatttattcatggattccgggttgatattatttcgattcccatgcccggctgaattcctcgtcccggaacagggaggcaatcccgctgagctgcttgaggcgcaacaattcttccgcatccatccccagatttttgagtatccacgcatccgacatgcctgcctccgtcaactcctggataatattggtcatgagggcgatattatgagatccccgggcacggttgtgcctgatggtggaagccatgcggtttccaagaggcttgtcgattacggccaccggcatcatgccaccctcccgttcgtaaatatcgcggtaagtcttcatgatctggcagcggtggaacccgtccacgatttcatatatcccgtcctccagcttataacaaacgataggcatcgtataaccgtcctccttgatgctctggtagagcagcttcatttcggggggagctacgctgttcgggttataggcattggaacgtatctgatccaggggaacgcgccggattttgtaaacgggggattgataggaggttttcataaaatattgcggtatttattgacggcggcccggcgccgggcaatcgctcccttggttgaatcgaacccggcgtacttgcaaaagtaatcattcttcatgatgcagatgcacatgcgcttgtaggaaggcacctgccggaaattgctgaccggcatgtcgtcgggatagcccataaactgaatgacgtcgcggtcgacgtaacggcccgacttccccgtcacggtcgccagaggataggcggccagcacttcatcggcagttccgggatcgacggtgccccctttcatccagtactttttagacctctccaaaatgttgttgtagtgttccgccgttttctcgttcattgtggaaagcaggaattcataataggacttccaggtatggccgggcggcagtttgatggttttccagcccatggccgtcgtacctccgtacaaacctgtgaagttgacgccgttgacgcgcccgaccatgcgcgcccagttggcaggatcaataactttgtaaagcttcaggctttcctgggcgcagtcattaaacgggcttgccacccgcatttgcccgatcgtaaggcctgcctggtacaggagatcgtaaaggcggttatagtcaaaaccaaaacgggcgttggccgtccagacgtcactgacgcgccagtcataaagagggtaggcgctgacggtcacggcatcagcccgtgtaatccacttccttccctcataagacgtccttttattgccgcgggcaacggcggcgtatctgttgaggctttcatccgcccgcagccctaccatgacggcagtacttccgtgttttttggcaaaatggcgtgaaagcttatcctggaattcatagtccaccataccgtgccggaacgggacgtccagattcttttcattgattacatagggattttccggcatgggtcgcacccacagttttttctgggcggcgctccacggcgtccagtaaggttcccccagggagcatgcggactgggccctgatcggtacacagtaccacatcttacgaatgccggggaattgctccagaaatgttctggtgacatactcggtcgtcatctgatattgggcctcataatcaaggtgatacatggacagcttatccagaaggccctgttcggcggcgtaacgatagcagagattaagcatgacgccgctgtccttgccgcccgaaaaagacaccaggacattgtcaaactcttggaaacaataggctatgcgttctaaagccgcctcataaacatttttatccagatatgttttcacaacttttccaaagcctgtctttcgccatccgccgccagccccctgccggacgggaacacgtcggcccggatatgatcgccggaagccatgcattttccctgaaaccactcttgcagcttgcagctcatagggatatcccctgttctttcaaacagggttgcaacgccttcatttctgcataaataagcaacatcatgttttttcatgttttcaaatgcgcagcagcttatcgtccgttattttccgtcaacaataccaacctactgaattattgcggcgggtcaatgtttttactgcaattatttcagtaattttattgtcatcaccctccttctcaaaatacctgcgctttttagcgagcaacaccattccagaaatgccttatgcattgcgccatgacctcctttccttctccgcaacatctgcgctatgtgcagcattcaagacgctacgttggaatacacggtttcagaatcggagacacagcaatcataacttgcttaaaattaggtgaacgaaaaaatgtacggctcagagccattttccggttccaacatctttcccccaatactctttccggaaccgcatcttccaggcagacgatacatccatcatttccctcctgaaggaaaaacaaccgtgtttccctttttgcaatccgggatgctgtccaaacatgaatatgccggtacacgccttaatcatgccgccagattagactttaggcgttttatgattttccccgaaacgccaatttcatgccagaacggaatcaaaaaatgacatttagtcagcacttatggttgtttttccgcggtttttcacctttccagcctcaaaacagacaaaaaagaagccctgtaatccattaaaattacagggtttagaaaattagtggctcccccggttgggctcgaaccaacgacctagtgattaacagtcacccgctctaccgctgagctacaggggagtttgcattccatggaacgcggagggatttttactggaggtacgggcgtttggcaagtacttttttactcttgcaggctttttgacgcaaaaaggcttccgcggcgcggtcatggcaacggtgttttcttgacctttgaagggagaatgaccagactttcagcgacatgagtgaacatcaccatcatattgctgtcttggccggcgacggcatcgggcccgaggtcatggcacaggctctgaaggttctggatgccgtaagcggcaagtttggctttaccgtaagccgcaaggaggcatttgtagggggtgcgggcattgaccactgcggcaaggctcttcccgaagaaaccattcgcgcctgcgaagaggcggacgccgttctgttcggctccgtgggcggtcccaaatgggagcatctccccgccaatgaacaaccggaacgcggagccctgctgcctctgagaaaacatttcggcttgtatgccaacctgcgtccgggcgtatgccttccggccttgacccatgcctcccccatcaagaatgaactgattgaaggcggattcgatattttatgcgtccgggaattgactggcggcctgtattttggccagccccgtttccgcgaacgggagggagacgacgaagtcgtcgtggataccatgcgctaccataaaagcgagatggtgcgcatcgccaaagtggcgttcgaggctgcgcgcggccgccgcaagcgcgtcaccagcgtggacaaagccaatgtgctgaccaattccctgctgtggcgcgagacaatgattgaagtttccaaggattatcccgacgtggaattgctgcatatgtacgtggacaatgcagccatgcagctggtgcgcaatccccgccagttcgacgtgctggtgacggaaaacctgttcggggacattctttccgatgaaatggccatgatttgcggttccctgggcatgctgcccagcgccagcctgtgccagggcgcacaggacaacggcctgttcttcggcctttacgaaccctccggaggctccgctccggatatcgccggcaagggcattgcaaacccgatcgcccagattctttccctttccatgctgttgcgctactccctgggagaaaaaacagcggcagacgccattgactccgccgttcgccgcgtgattgaccagggctgccgcacgggcgacctggctacgggagctcccggagaaatccgcgtgaatacggcggaaatgggtgatgccatcatcgccgccctgtaagcagagccgttcttccggcgccgcaggggaagggacacctgcagcacgcctttcctccggggggagcggtaccgcctcccctccgctttcctctttcatttccgggattttccggttctttatctatctatcatgaacatccttatcatcggccagggaattgccggaagttgtctggcgtgggaattgaaacgccgcggagcggagtttacggttgcagaccgccccgtagcggaaacggcctcccgggtggcggccggattggtaaaccccctgacgggccgcgccttccgccccggatggaggcaggaagaatgcctggcggcggcagaggccttttacccggagacggaacgggaattaggcgggtcctggtggcagaaaactccgattttccgggaagtggagacggaggaccagtttgaaatctggcaggaacgccagacggctccggaatcctgcgcctatgccggacctctttttccatggccggaacactgggaaggccgcgggaaagccgcctatacgcgaggttccgccgtgctgcacgtggaaaacatggtcactgccatgcggcgtttttttatggaacagggccgttttgtggaagcggatgtatcccccgcagatatccggccgaatgcagacggtcttttccattggaacggtcgcacgttttcccacatagtctggtgtaccggctgggaagccgggcttcatccggacatgtctccgctgaaggggcgcccctccaaaggaaccattctggacttggacttgaaagagctggactggcatgccggcatcctgcatttcggacactggctggttcataacggttctttctggcgcttcggggccacctacgcgtgggcgtgggatgctcccggcattccggaagcccccgccgtccaggaattgatgctggaccttgttaaacgctattccgggaacatggacgtcatccgcgcccgtgccgccgtccgccccatcatccgccgcagccagccggtcgccggccccattcccgggctgaacggccagttcgtcttctccgggctgggcagcaagggggtgaccacttccccctgatccgccgcccagcttgccggacatctcgtgtgcggaacggatctgccgccggatctgctgcctgccgcgctctggaaatgatacggaacatcagctgtccttccttgaacggaacagctattttccttgtcaaaaggttctgaacgcgattacatgcggcctaatatgcgagcggagaacgagaactggggagatacggtacggaatcatctgtttgaccagcgcagcgccgtcatggtgcactggctgattctgctcaatgtagtcatctttatcctgggattcttcttccaagtggacatcccaaggaatatttacccgcctgtccatttggacttgatccagctttacggagcttacagcgaatatacgtgctttcacgagggggaattatggcggttgcttacctatcagtttcttcacgccaatctggggcacatcatgttcaacatgattgccctgtggtttttcggcccggttgtagaagaacgtttcggccattggcgcttcctgctgtattacctgttttgcggcgtggctgcagccctgttttcctccctgctggggtacatgggattttttgatccggaatggcgcttcattcccatggtgggggcctcaggttccatttacggcatcatggccgcatgcgcggtgctctttccccatgcccgggtacagcttctgtttcctccggttaatttgagcgtgcgccagtttgccctggccgttctcggagtcgccgcagccgtcattatcttccaatggaacaatgcgggcggggaagccggccatctgggcggcatgttcgccggatttattctgacattgctgattttatggaaggaaaagatgtcttccccaagacggaaagccgcctcttcttcccactattcccctgagccttccagccgccgcccggcacaggcttacccctctgaaaaggaggtggatgaaatcatggaaaaaatatccaggtccggcctgtccagcctgacggaggaggaacgggaaattctccggcgcgcttcccggcgctgaactatttgttagatatttttatatttttcgttattttccttcctttttgccatccatttcctagcatggatgaatgatgacgcgactgtattcctccaccgtcctgggcgtagatggcgtagaagtggaggtggaagtggatttccgccccatggcggaaaaacgcacctttattgtcggccttccggatgcggccgtgaaagaaagcgggcagcgcgtggacacggccatacaaaacagcggccttccctttcagcagggtatcttcgtcgttaatctggct

SEQ ID NO: 6 - DNA, 2835102 bp, Akkermansia muciniphila (residues 1-1,417,551 of 2,835,102)
  source 1..2835102: mol_type = genomic DNA
agaattcaaaaactccttcctcacaccagacctggtccggacggcgcaacttcagctctatctgtcgaacctcttcccggagcgtttccagatgcctgatacaggcgggtttcgtgcggaaaccaccgcccaacaaaccttcacgtatcattatttcccgcgcatgggcgggattgatacggccatagtgcacacgcctgttatcaataatgcgcaaaccgccgcacacgacgcgttccactgcgtaaacagccccctgctccctgtcccaccgcgctccggaatagtgtgattcgcacagatggggcgctacccgctctacccattccggttccaaaatggaggcgcggcgcatccacaggcgcgtggtgtccaccaactccacgcccattacccattcactcctttttttacggcggaacaggcctgaaccgggaaaaatgccgaaggaacgtcctccggcgccgcgatattcccggttgtctgcatcccagaggccgaactggcgcggaacgcccgccaggatgctccggtgaatcatggcaaaggaagcctgccgctccgtttcttcttccaaaggagaaattctgcatttcagtgtttccctgaccagccgggaaaggtcctcccataaattgaaccattccatcatgcggttgaaattgaggaaattttttccgcaccatttccgaagctggtttttacgccagcgccttccctcccggaattgccatgcagccttccataatttgagcagagacaggaagtcactgtcttcttccttccactgcgcgtgggcctggtccgctttctgagcggcatccgcagggcgttcacggggatccatgatgcccaggccggctacaatcaccagcatttccggcagggcctgttcatgttgtgcctccagcagcatgcgggccagccgcgggtcaatgggcaaccgcgccagctttctgcctacgggcgtgagctgccgggctttgtccagagcgccgatctcccgtaaggtgcggtaaccttccgtcaccagtttggatgaaggaggatccggaagtgggaactccggcatttccggcaatcccaggtctttcatccggagcagcgccccggccagtgcgctgcgcctgatttccgggtccgtaaaatcgggcctgtcctcccagtccttctcactgtacaggcggatgcacacaccttcgcacacacggccgcaacggccggcgcgctggcgggcactggctttggagacgggttctatctgaagccgctgcacttggcgtgccgggctatagcggctgacgcgcgccaggccggagtcgataacataaatgatgccggggattgtcagggacgtttccgccacatttgtagccagcacgatgcggcggtatccctgctccggatgaaaaatcctttgctggtccgccaggcccagcctggcgaacaaaggcagaatgcgcgtgtttctcagattccggccttccagtttttccgccacctcacgtatttcgcgttctccgggaaggaagacaagcacatccccgcggtcgtccagagtatccagccaatccacggcacgtgccacatgagccggaagttcctcatcgtcatgcagcggcggcagatagtggaagtccaccggataagtgcggccttctacctgaataataggcgcgcctccaaagaattcggaaaacccgccggcatccagcgtcgcggaactgatgaccagccgcaagtctctccgcctgtccagcaaaagccgcagatagccgagcagaaagtcaatgttgaggctgcgttcatgcgcctcatccaaaatcagggtatgatattggcgcagatccggatcatgctgcgtttccgccagaagaatcccatccgtcatgaacttcaggcgcgtatccggcccggctttttcctcaaagcgcacctggtaacccaccaaacctcccaggtcgcagttcaattcctccgccactcggcgggaaacggaagcagcagccagccttctgggctgggtgcaccctactctgccccgcgcctccccggcaagctccatggccattttagggagctgggtagtcttaccggatcccgtctcccccactacgacaatgacctggtgctcccgcattgccgccagaatgtcattccggcggcgggaaatgggtagatccggataagtaatgttcatggtgaagatgagaaaaaaaccctgcaagaatgtcctgcagggttgaagaagaaaaccgggaggttcttttactggcagggtttgggaagggcgatacggccgctccgggtcagcatctgcacatcataatcctcaatgagggacaggaaacggtctatcttgtactcgcctcccgtcacttcaatggtcagggcgtcccgcgtgacatccacaatgtgggcgcccagtatctggcagaactcaatgacttcatgccgcgtggcggaatctacgccaatgcgggtcaataccgtttcccggtacacattgtccgtattgcggaaatctactacttccaccgtgttgaccagtttttccagatgcttgataatctggtccagaacatcctccttttcgcgtacgacgatggtcatccgtgaaaagcgcgggtcctggctaggggcaacgttcaacgaatgaatattgtagccccgtccactaaacaaaccggcaatgcgggcaagcacgccaaatttgttttcaacaagtacggagatagtatgacgagtcataatttaatttcttaaaggtgatgcattgtaagcacttttgactgccagtcaagcctgcggacggcgatgccggaaaacgtttttcctaacggaggttccggcaggaaccgctcaggccggatcaaagctcgtgcggtatgatggcgttgccttttgtcgcctccggaatgcggggaagcaatgttttttcagaaacggggcgcgcatccactttcacattaaattgctgcccgtcgcgggaaacggtcagcaatgccggcccttccctaagagctttgaccaaggcttccttggtgctgacactctggtggtttacggcaaagaccatgtcgccggactgcaatatctgccctacggatttcttcggattcacttgaatgaccagcaacccccgagcacctatggattgttcttccgcagtcagttcacgcaaatgcattcccactccttccatgaagtcttcccaaggagaaggaacattttttaaaatactatctcccaccttcagggtgacgttcattttctgccctttgcgccagactttcagccggaacttgtcgccgatggaaagattttcaatgcgttccttcacttcctcatccgtctggatggggacttcgttgaaactcagtattacgtcacctgtttgaaggcctgcctgctccgccggggaaccatgcttcacgatgttgattactgcgcctcccgcctcatgataatccaggaagctgcgaagcgggggagtattgcgcacaatgtccaatcccagataccctttcatggggcggccatgtttgcaaatctgctcaaagctgtgcatcaccagattggagggaatggcaaacccaatgccggcgtaatttttctccgcattgggaagcaccgatttattgatgccgatgatttccccgcggatgttgatgagggggcctcccgaattccccgggaagatactggcatccgtctggatcaagttaatgccggaatccaccagcttgcgttcacgggcactgataatgccgcgggaaacagtcgtgcccagcccatagggattgccgcatgccagaacaatcatgccgggcgcaatttcatcactgttgccgaacggaaggggggtaaacgtcatcgggttttctacctgcagcacggcgatatccagttccggatccacccctaccaggcgtacggaaacgcttttcccattgctcagcgtaacgcgcagcgcatgcttgttctgaatgacatggtaggcggtaataatatgcccttcttcagtaacaatgacgccggaacccaaaccatgaaccgtcagcctcttttcaatcatgaaatcaccatcctcggaaggctgaggaacgcttgtcacgcctgtagtgtctatgctgaccaatacccgttccaccagccgggcaacgcgtgaatattcctcattgagctggtgcaaaacaggaatatcctcctccttcaattcgggctgctgggccagggtaaacacttccgaccggaaggaaacattcttctccgtaacacgactgttccatctccaataggcaacggagaccacggtcatcataaccgtcatcatgatgacaagtaaagcccgtgtccatatggtcgatctcatggaaatgccctgccgtaataacgatcaaacggtttgcggcttgatcacaaggagatgcctgaaaacggagcctgtcaagcttcagccgctttttgacattccggttccattgatactatttaagtactttctcttcaaatgaaaaaactttcaaatgacaaatacgcctttcaacaaggcgtgctttatgatatcatgcggccacggttttatgggttccagcactttacaacaacaggccattcatctcgtcttcggtacggatgaaggaatggtgcgtgaaaaggcttccggcatctttgccgctctgacggaaggcacaaacgaattttcccatgaaattctggaagcggcctgcggtgattccgatgaagcggcccagctggtacgccaggttatggaagctctgcggaccctcccgttttttccggggcgcaaagtagtctggatgaagaactgcaattttctgggagactccgtcacggggcgttcctccaccacggaagcggctctggattctttcaggcaattgctggaaagcggcctggggccggacgtcctgctgcttatttccgcttccgaatttgacaaacgccgttcctttaacaaattcctgcttcaatacgccgcatcggaagaattgaacaagccggacatcacgaaagcaggatgggaaggcagtttaatgcccctcattaataaggaaacagcggcgcggggcatgaatttcgactccaccgccctggaactgttcattcaccgcgtcagcgaatcctcccgccaaattatttccgaaattgaaaaactggatctttatctgggagcggacagacgcaccgtaatgccggaggatgtggagcgcatggttccgctgacgcgtacaggcgttatttttgaaatttcccgggctttggaaaacaagaaaagcgatgcggccatctctctgattgactttcaactggaacgtggtgaaaacgccatcacaatcatgcgtgccgcattcatccctacgttaagaaatttgctggctgccagacttttatgtgacgcattccacctgaagcctaccaatttcaaggaatttacagcccgcatttcttccctgccctcctatgcggccgcgttaattcccttgaaaaaagacggtacacccaatgcgtatccgctttttctggcggcgcagaatgcttccaaattcaagacggaacggctgaagcaaactttgaaagaatgcatgaaggcggataaagccctggtgtcctcctctcttgatccccgcctgattctgcatcgtcttgctatctgctctgcatcctgatgaactcctcctcttcttccgtttttcccctgtttgacgttctcgtcgtcggcgccgggcacgcaggcattgaggcggcactggcagcatcccgtctggggtgttccgtcgccgtcctaactcataacctggatactatcggacaaatgtcctgcaacccggctattgggggacttgccaaagggcatatcgtccgggaaatagatgccatggggggagcgatggggttgaacacggatgctaccgccattcaattccggatgctgaacgcttccaaggggcccagcgtgcgcgctccccgcgcccagtgcgataaaacagcctaccgcacaagaatgaaaatggttctggaaaccgcccccggcatacgcctgtttcagggagatgtggtcaaactgctcgtcaatggagaacagcaggcaacgggagccgttacttctctgggctgcgccatccatgcccgcagcgtgattatctgctccgggacattcatgaagggattgcttcatgtgggccttcaacacataacaggaggccgaatgggttgcgcttcttccagcctttccgccgatcttgccatgctgggttttcaggtggaaaggcttaaaacaggaacttctccccgcgtcaatggaagatccatcgacttttccgtctgcgaaatacagcccggagacactccggaagccctgttcagctaccgttcccgtgatatactgaaacgtgattccgaacccttttgcactttgaacacgtggggagatgaaaatttccggatgaagcaaatgccgtgctggatcacctacaccaaccagactacgcacgacattatccggaagaacttaaaattcagccccctttacagcggtatcattgaaggcgtaggcccccggtattgtccttccatagaagataaaatcgtgcgctttgcggaaaaaaacagccatcaggtattcctggaaccggaaggccgcagtacggaggaattctaccttaacggagtttctacttcactgccctactccgctcagtgcgacttcatccataccattcccggcctggaaaacgcacagctgatccgtccgggatatgcggtggaatacgacttctgtcctcccacgcaattgcatcctacgctggaaacaaaactggtggaaaacctgtactttgcaggtcaaatcaacggcacttccggctatgaagaagccgcagcgcaaggactaatggcgggagcgaacgccgctctgaaaaccctgggcaaaccttctctggtgctgcgccgggatcaggcttacatcggcgtcatgatagacgacctcgttaccaaaggaaccgatgaaccttaccgcatgtttaccagccgggcagaattccgcctgttgctgcgtcaggataatgcagacctgcggttggcccctctggcttttgaagcgggccttattacctgtgaaatggcccggaaggctgaagacaggaaaaacgccgttgaagaaggaataacaaaagctgccgcgcttaaacatgaaggagtttctctctctacatggcttaaaaggcccggcaatgactggactctattgcctgaagaactgaaaaaaatgttccacgtggaacatttggatgccattgctacggatatccagtacgaagggcatattgaaaggcagaaaaaacaggcggaaaaaatcatacggatggaaaataaaactattcccgccgatattgattacgaacatgtccatgccttaaaaaaagaagctgtcatcaagctgggcaacatacgtcctgcaactatcgggcaggcctcccgcattcctggaattaccccggcagatatcgccctgttgcttgtgcatctgcaaaaacgcagcaggcaacaaacataataccccgcgttttttattcagaaatttcaatttaaggaggaccataggaggcgggtattggaaaaataaatatgacagggacatccttgagccgtatatgatcccattatatttccctgtcgtcattgcctggagtcgataaaaagattcaatcctgttttctgaatgtctttttgcgcgacagcagctcttcccttcctccgaacaaccaccactttctgcttgtcgtaaaaagaaatggaatatcccttcagtattattgaataccggccttcctgatttatccatcgcaaatcattaagaagcgtcacacgatttcttcacggattccattcaaatactgccgataagaaaaagcagcattgagcttactccaagaggcaagggaggccggaagggctgaatgacaaatccaccgggcgaatgaaaattaccttcccaagtttaaaattcttcggataaccaataaacaaagacctcatccattaccggtaacagatatctccccggatacatacatcatctccaaaaatattcacaacaggttgttcaagatgggcttcatgctccagaaacggaccgggcgctacgccgtccgcaccgccgccgataatgatgggagcataaaaccccacccactcgtcgactaaaccggcttttagaaattcccggaccagacagcctcccgcttccagcaggatagttcctatttttttatcattatataatttttttaataattccaaataactaaaaacattctccacaaccaaagtgcggtcacgaaattcatctgttaaacaaatggaatccgcaggtatggaagaggcatcatgggttagaataatacgccagggttgttccttaaggggagaaacaggacgatccggtttcctaatggtcagggacggattgtccagacgcacggtattccctccggtaagaaccgcatcacattcggcacgcagggtatgtacaaaagatctggatttttcattcgtcagccattgggaacgttccggactacgggaaatgcggccatccagagacatggcgctttttgcaattacccagggacgcccttccagcatgttcaccctgaaccccctgattaaatgatcgcattccttctccagaaccccgcgggtaaccttgatgccggcctgttcaagaatatcagccgcagcgccgcggtgtttgggattaggatcttccgaaccataaaccacccgtttgaaacgatgtttcaaaatggcatccgtacaaggcggtgttttcccggaagtactgcatggttccagagtaacatacaaagttgagtccgcgaacagggaggcattgccattcgccactccgtcggcaatagcctctctttccgcatgaggcaagccggcttttttatgaaatcccgaaccgatcacctggttttcatgcacaatgactgcccccacgcagggattcggactcgtaagtccgattccatttgaggccagttttatggccatgttcatccaacagtcatcctgatttttcgtattcacgccgttttgtagcatgaaaaccggaagaaggacaatcacgttgtgtgattgaagaatattaggtttaacaatattaaattccttcttcttctgctgtgtgcctagtgtgaataagattttaaatggctgtaaatgagagtattgagcatcatttcaaatgttaataaatttggcccgcaagcttgtgaataatatctgaataagttattcacatcatactcacagttaatcaacctggcctttcacaaggttattggcaggtgcggctgtaaacagaaacggcattcctgcttgcagaaaacccggaggaaagcataccatccttttgtgaaggctgccagattgatttacattccggagagggatcatacttttcccgctacaagccctgaaaggcccttctacggcttttccgtggctggaatgaatatagccgcttactgtgcttcccgtcttcgggaagtgggctttgaagcggtttttgacccgggaacgccggtttcagaagaaaaaggggaaatcatagaagtgtccatgcatgatttttccccggaggcggccatatggcttgccttttgcggggcaggggaagcaaggagtgaagaagggcatttgctggcccggaaaagtggggaaaacgggttgacgcgggtattcacgcggaaggaagcagcgatagagcgcctcgtttatccctgggatcttctggaatggcaggaaagagtgatggagaagatggagtgggaggatttctccggaagggaaggggtttatgtcatgggaacgctccgggtaggggaaggaaccgtcatcatgcccggcgtggttgtagagggagccgtgtgggcgggtgatggctgccgcatagggcctaattgctatttaaggggttgtgtatctttggggaatggctgtgtagtagggcagggagtggagctgaaaaattgtatcatcggcgacggcacatttattcctcatttgagttatgcgggggattccattattggcagtgacgttaatttcggcgccggaacggtatgttccaattttcgccatgatggcggcgaacacagaatggtggcgggaggaaagctggaatttactggaagaaacaagcttggcgccgtcattggagaccatgttcggctgggtgccaataccgtcgttttgccggggcgggttcttcctcccggtgcttggaccagaccgggggaagtcttcacgggggcatgaatcgggtaaaggaattctcttaatactgaaaaggccgcatgcggaaaaacgtcttcccgcatgcggcctttggcgaatggttaaagttgcttcagcagcaacggcggcggcgcatcatcagggcagccagccccaacaggcccagggaagctgtggctgcttccggcacaggaagcacaacgccgtcataaaatttgatgttgttgatatccatagtgccgttcatggggcgggtatttccaaaagaagctccaaactgggagcctgtcagggcgggggaggatggattccactcggtaatcgtacctgccagagcgccgttgacatacacggaaagcgtttgggaggaaagatcggaaacgatgctcagattagtccagctgtcctgctggagatccgtccaggtcaatcccgtattaatatttccgccagtttggccgccgaactccttattgtagaggtataattctccgttattagtgaattccagcaccatgctgttggattctccggagaccgttccattggtgtacaggctgaaaatgtctttccacccattgctggtggaactcaggtttttcaggtcaaagctcacggtaaaactgccttggatgcccgttatgtttgagttatagggagtgccggaactgctgccgaacgtggcgtaatcattgccggaagtgtaattgaaggaaccgttccagttgggggcggttatttgtgctccttccgcagtccattcccaggaatagataggggtagccgcatgggccatgcctgccgctgccagtaaagataaaataataaatgagcgtttcacggaaattctgaaatatgggttaaaatcaatccgataggagggtagcggattataaatccggggtcaaattatttttctgaaaacaaatcatttaacggaaaaaagattacggagaagataaaagaagagaaaacagaaacggcattcctgttggaaagaaaacgtacatttccaataaaattgccgcatcctgggaaaaaagagacaatatccggatttataatccgcacaagaatattgaagaaatctgattccctggaatggatttttaagaatgcttaaataatttgaaaaaccttttcatgcaagatatgcccggagaaattgcatattactatatatagtatgcttttaaaaaaatactgccaaatattagggtttgacggagaaatggcttgaaccatgaaaggcacttatgagaagatgcgaggcagataaaagcacagacacatgaagtttaccatttccaagcaagtatttctcgacgggctgagacaggttgccagcgtcgtgtcttccaagacgacgctgcccattctttccaatgtcaagattgaagctgaaaacggccaggtacgttttacggctactgatcttgatgtatgcattactggcgtggttcccgcaaatgtgctgcgtgaaggcaccgtgaccctgcccgctaaaaagctggtgagcatcatcagcgaacttcctgaagccgaagtccaggtggatgtcaaccaacgcaaccaggctgctgtggaatgcggccgctcccagtttaaactgaacggccttccggcggatgaatttccggaactgccgtcttttgagcaggctactgtgtaccaggtggagcagaatatgttgcgtgactgtatccgccggacggaatatgccatttccacagatacgactcgctacgtgttgaacggcatttccctttctttccgcaatggtaaaatgactttggtagccacggacggacgtcgtttggctttggcggaaaccgccctggaatttccggaagaacagcaactggatgccatcctgcccactaaggctgtcggagaactccgccgccttctggatgaagtgggaaccgtcacgatccggttcacacgcaaccaggcagcctttgaaatcaacgatacgctcttaatcagcaaactgattgacggcaattacccgaactaccggcaggtaattcctacggattgcaaggaaagtatcgaacttccctgcggggaactgctggaaacagtgcgccgtgtttctctcctttccgtggataagagcacaaatatcaagctgaattttcgtgaaaacgaactggaagtggcttccagcgcagaaggagtgggcgaagctcatgaatcgatgacgatcacttattccggaaggtcgctttccatttcctttaatccggatttcttcatggctcccctgaagacgatggccggggatacggtcattacgctgaacctcattgatgaaatgagtccgggcgtcttgaagattggcgatgagttcctgtatgtgctcatgccgatgagatctcccaattgattttggtggcacaaaatcgttcatacagaggaacaggcgtcatggagacatgacgcctgtttttttattggctgagagtgaatggaaaagaaatgttattcacataaatgttctacgtggaacattttttattttccattacaggaaaactgtaatctgccttgaaaagacggaacacctgcatggggcgcgaggggcatcgccggaaacctctgcgacgacggaagaatgccattatccgggaatgagaagatgcggggacagcaaatattcagagcggagaattgacaaattttactccgtatcactcgcccagcagacccggaggagcgaacaagtccggagcaagatgaaagggataaaaaccggatgcttgaagaatggcttcacggacggaggatatggaattgaaacaggaatgttccacatccagaatacgtccgtccttcagtttaatcatcaatccgggttctgcctcattatttggtgtgcatcctatgcgttcaattaattcccacggtatttccctgcgtgaaatgctgttgccccagaagatggaagaagaagtgattgtgagaaaataaggcctgcccataataacgggaagccacaggaacagtaaaagggcgccgagaagaaagttccaccagccggaaccgaaaaaagcccaggccaggctgcatcccagggttccgaggattctccctcccagccgataactgcggtagaaataataagtgttcatgagttgcgaagtcaatgaaacgtcaaaccgaccatggaataataagttcccgaccgtattctacacgataccgctttatcccggcaaagacaaggtgataagtcaggaaatccagttcagcatgtcaggcggtacggaaccgcaggaacgtatcagggaaagaaaatgctcttccatttccggcggcggaggaaaaaggccaggcaaaactcggccttcggcaagttccagagctccctggttatgaagagccaggggcggatcaatgtaacgcatttgcgtagggtccgacagaataaaattaagagggcggccttcgttcagcaggcggtttttcggaatttccggcccccattcatcctccacacccatattggcaagcagaacgccggaagagaaaagcatggccgggtcaataagccctgacatggcatgccgctttcccgtagccgtaacggcgcagaaagcatgcctgattgcgtcagtaagggtttccctgtccgttgccggcacaaaagaggcggaagccagaggttttttttccacgtccgctacaatgacattcagtttccgtctgagagcatgcagagctattccacggccaacttttccatgtccaatgactaccagagtctgtccctgttcattttttattccaagagattccagagcccggaaaaaactttctccggttccaaggcaggtttctatctgtttaatctttccggcgtccaccatccacacgggctgcgtgcatgccgcatagcgttccgcacccgagcgggttaattccacatacccgcagcggctgggaacatggctgagcgctccggcgcagtccatgaccacatcataaggtccgcctgcccgttccgcttccaccacgggaattccatattgtcccaataagacggctgtttccgagtcatagggcattaccggggagaccgctactgtcagctccgctcctgcggccagaagagaggcggatttggcgcaggtattccggaacacgggagaagcgtcaataatccggcatccttccagagggcgactttccgaccacgttttatactggtgcaggagaacgggaaattcttcctgccggtaaaaggggaacaaattttccagaatgcgctccggagatgcaggcataacaaaaatcttagggtttctcgcagcagagggtaatccctatcctgtcgttttcccagaaaaactttgttaaagaaatatcttttgtttaataatttttaaaagctgtagccagttcagggaagacaaagtgctaagtcatctgtattcgcttgcaagtattttatgcgcgtgtcgtggcatgcctgagaacaatctttttaactgcattcttcacctgtttgatgcagaagtgttttctttttgcgtagaataaataggacagcaactgttaatatggtcaacatttccgacagacaaagtgctagccacgcaccgttcgttcccattgcttcaggcaacaggataaagcatggaataagaaaaacaaatcctcgcaacagggcaaacaaattggcgagttttacattttccacgctttggtaataaccgatgagcatcaggttgatgatgaagaaaacaaatgccagggagaaatatggaaatccctcaatggctatgagcgccgcagtgctgtccggattgacgaacaagcctaccagaatatgcgggaacaaaatgaatgctgccgtcgtgactatgccgcaaacaacggaggtaaataatgcgatccgttttgtatcggctacgcgttttttctctccaagcccgaagttatagctgatgatgggttgcgctgattgcgctatggcattgcctaccatgaatacgaacggaaggtaatagcaggcaatgccgaacgctcctactccattatctcccagatatttcatcaatgtgtggttcccgacgaacatgagcgtggccagtgtcgcttcagtcagcaaagcggaagaaccgatgcgacattggcagacaatattaaggagggagaaccgaaaacttctgatgctccatttaataggataaagccgcagtttatgtgcaaatttccataaataaataaggcccgtggcgccgctcgcaaacagtgctatggttgcggcgaaagcagctcccgtcaatccccagcccaatggaaagataaacagccaaccgagtattacggtgatgattgcagcaatgatattgcacatcatagccaacttcggagcgccatccaaacgaatcatgaataggcagacagagcaccacatctggaatatcaacgaggggatgaaccacaacaggtattccctaaccatgggggtaagatgttcggaagcgcctaaaaatcgggctgtagctgacggatatgccatcatcaaggcagatggcacgatggcggcaatggtgacgaacaacaaggcctgggtgacattaaggcgcgcggcttccagttttccttttgatagctgaatggaagcgactacggatgagcctacgcctgccatgagccctatcccggtaaacagcatcagcaggggaatacatatattgatagcggcaatgccatcgcttccgattccgtggccgacgagtattccgtctactgccgttactgccgatatgctaagcatcccgaataaggtcgggataaaatactttctgaataatgtgcatacgtccagtgtgcctaaatcaattgcatttcttttcatatgtgtctgttattcttatggctattttttgccgggaaacaaaaaatgccggataaggtgattggttttacccagtcatcttatccggcatttttatttgccctccgatgaggattacaaaacgcttcttttcgttgtgtggccgtaaaaatagtgcaataatttaggaaatataatttttttatacgtcatgttaatgccttggaaaaaatgggatagaaaaaagactgctttccgggcagtctttttaaaacagtttgtgttttgaagggagcgttttcccggcaggctattgtttgcggcctccggattcctgttgttgtgcgggagggattttctgcgcttccggcacggggagcggcgttttctggatggtaacgggcgttcctatgctggtttgcctgtagaggatttccgcaacatttcgcggcagacggacgcagccatgggaaacaggatgccgccgaactttccctacatgcaggcccagccccgcgttggtaagacgctgccaataaggcatgggagagccgtcaaaacgacctccctccggtatgggatccgtggattcggcattgtagttgatgcatttgccttcggcatcatacattttgccgtagaggttggaagcatggtcttcctttttggagataacggcgtagtcccccgttttggtcggataggcttttacgccggaggagagggggaagtccatggcgaccaagccgtccaccagatactggccccgttgttcgtccaggcagacgaagatttttcgggattttttcggctggcggttcagcaaggtatcgtccttatagacgtcgtacgttttccggtagtccttgcgggctacaaaatgagcgtatgtggaaggatgaaacgggtttttatattccggaacggatttgtccacggcacgcggatccggcagggccgcatggcccgtgccggagtgggaacaggacgcccaccccatgagcaccacggggaaggcggccagaacaaggagaggcttcataagtggtggaaccgggaggatcccccggattacttggaacgcggaatcgtcaacttctggttgatgtgaatcagatcggacttaaggccgttagcccttttaagggccttgacagaggtgccgttcctgcgggcgatggctcccagcgtatcgcctttcttcacggtgtaggtgcgggccttgggagcggatttacgggaggagctctttctggcagccgtgctgcggggggatttgctgccggccgtgctcttccgcgcggatgattttttagtgacggaaggcttggcggggggattgtaagcgtagctggaagaactctgaaccgggctgtaatggccggattcgtaagcgggatcagagctttccgcgatccacggcgggatttcgccgctggccggttccgcagtgtcgtaaccggccgtggaggaattctgggtggagcaggaagagagggggaataccagcgcggcagcgcaggcgcaggttaaaatgaatggcgttttcatgtgtgccctgttcatactaatttatgatttcggattcaaggcggtagcgcggattgtcgggattttttttcagaccttgcccagattataaaaggtttccgcatttcgggtcgtcacatgggccagatcttccaggttcatgcctctggcagcggcgatgaaacgggctgtatgaatgagatgggcgggttcgttcatgcggccccggaggggttccgggctgagatagggggagtccgtttccagcatgatacggttttccgggcaccagcttgcggtttccgccactacgggggcgtttttaaaagtagccaccccggtgaaggagaccatgccgtccagttcgtcaaagatccgcatggcctgagcggtatttccgatgaagcagtgaaatacgggacgcacgcggcccgcgtagttccgggcaatagccaaggcgtcctcaaagctcgcggagcctttccggtcccgtgtatgcaggacgatattaaggcccaggcgctccgccaggtcaaagtgccgttccagaaggtcttgctgaaggcggtggaattgttccgtttcccagccttggggcgccccgtggaagtaatccaggcccgtttccccgatggcggccaggggaacgtcctgcgccttccggaaaagctggtccgcccagtctgccggggcgtcatgggcatcgtccggatggatgcccagcgcacaaaaaaccgcgccgggaaactggcgcgcccacgccgtgtttgcctcccagtcatccatccgcgcccccagcgtaatcatgcggtcaatgccttcccggagggcatgctggacgtaggtttccctgcgggactggtcgaattgagcggaagccagatggcagtgcgtgtcaataatcatggtgtaagggactgtggcggaacggatgaagtttgtggatatttgccggctttgaaaagtgcaaacgcagagcatgcctgatttttccttgccacgcggaagtgaaacgcacaaactgccccgcatgaaatgtacggctttgtgcatgtgcgccgccctgctgccggtgggcttcctgcaggcaggaacccagcagatagaagcgccgcaggagggctccgttatcagtttccatctggaaaacgatatgttcgtgggggatgatgataattataccaacggcgtccgctttgcgtggatgtccggcaccacgtcccggagccatacgttttccggcatgctgggaacagtgctgggcggcacgaacgcctcggattcctggcggcggttcatgggcatgaacggttccgccaacctgcgccagcagtggggcctggacctgacccagctcatgtacaccccggagcagaaggccacctatcccatctacaaccagcacccctatgtgggcaacctgacgctggggctgacctccctggtcaagaatgaagaccgggccaattccctggagctgcagctcggcaccacgggcacgaattccctcgccaagggctcccagcatttcatccataagctgtggggtatggagcaatggcccggctgggccaaccagctccccggagagatgaccgccaatttgtttttcaagcggtattaccgcctgcgcggactggagaagcgctacggctccggttttgaaacggatgccttggcttactggcatgcggacgccggcacagtaaaggtgcaggcggggggcggcatgtccttccgcttcggctataatctgggcaatacttctccggagaacagcattcgcggcgcgaccagcgcagcacctcccttcgtttataacaggatgtccgtttccaattgggggtattacggttatattcatgctgccgtgcgagccgtggctcatgacctgtatctggatggtacggtgtttcgttcctcccccaagtatgtgaacaagtatcccgtagtgggagaatggggttatggcttcggcctccggtacaagcgctcggaattgcttttcggcctgcattacatgaccaaggagtacacccagcaggaatccatgcagtgtgtgggcgttctccagctccggcatactttttaacggctgcgtttgcaggccgttcataaacgcaacagcagcttgcaaagggcaagtttgctgttagaattagaattgcggattcgtatgtaacaggacaatccgtttgtgcatatcaactccgacacatattgatttcatgagaacgaccagatcctggcttttatcctgtaccgcgctggcggtaagttccgccatgtgcggcctgggagcaccgggtgattccgcccccgcgccagcccccacagggctggaatgggaacaggaacaaaacctgcatttgaataaggaagctccgaccgcctttttcgcgtctttcagcgatttgcagtccgccttgaaagtgctgcctgaaaacagtaaatggcgcaggtccctgaacggtcagtggaagttccactgggcgaaggatccccagagccgcccggccgatttttacaagccggattacgacgtaaaggactggaaggagattaaggtgccttcctcctggcagactcagggttacggcacccccatttattccaatcagccgtatccctttgaacgctcctggccttatgtaatgaaggagccttccaacaagaattatacgtcctacaaggaacggaaccccgtaggttcctaccgccgcacttttgaagtgcctgcggactgggacggcagggaagtgtacatgcagtttgacggagtggattcctttttctacctctggatcaacgggcagtatgtaggtttttccaaagattcccggaatccggcccgttttgacatcagcccctaccttaagaagggggagaacgtggtggccgcagaggtgtaccgccattccgacggagcatatctggaatgccaggacatgttccgcctgtccggcattttccgcaatgtttccatctttgcgctgccgaaagttcacatccgcgactttttcgcacaggccaatccggtggaccagagggattgggctttgaatattgaccatgccaaaccggggaccgtggacggcgattggcgccttcaggtggatgtggatgttcgcaatctgtttccggcaacggaaaagctggacggctgcacggtttccatggccctgtatgactctgccggaaaactggtagaacctgtcaagcccaaggatgcgccatatgacggcgtgttggaaaagcccttgcgcattaccggcatgaaggattttaaaacttccctgctgggcatttattccaaacccagactatggtctgcggaggatcccaacctgtacaccctggtactgacgctgaagcgtgacgggaagacggaagaaatggtttcctcccgcgtgggtttccgcaatgtggtgattaaggacagcgtgttcctggtaaacggccagccggtgaaggtaaagggcgtgaaccgccatgaaagccatccggaaacagggcattacgtgactccggagcagatggaggaagaagtgcggatgatgaaacgcgccaatatcaaccacgtgcgctgttcccattatcccgcggatccttatttttattacctctgtgacaagtacggcatttacgtgcaggatgaggccaacatcgagtcccacggctattactatggcaaggagtccctttcccatcccattgagtggatgccggcccacgtggaccgcatcatggcgatggtggagcgcaacaagaaccatccctgcgtgattatgtggtccctggggaatgaagccggccccggccagaatttccgcagtgcggaaaagatggtgaaggccagggatatgtcccgccccacccactacgaacgcaataatgacattgtggacttggggtccaaccagtatccgtccgtggactggacgcgttccatggcgggcaacaaggatttccccaagccctactatatttccgagtacgcacacaacatgatgaacgccatgggcaacctggcggattactgggaggccatcgagtcttccgaccgcattatgggcggcgccatctgggactgggtggaccagggcttgtacaagaccctgccgaatggagaaaagatgctctgctacggcggcgatttcaacgaccatcccaatagcggccagtttgtgttcaacggcaccatcctgtcggatcgtacgccggaaccgggttattttgaagtcaagcacgtctatcagaatatttccacatctttgacggacgacggcaggatttccattttcaacaagaatttctttacggacctttcttcatacgacattacctggaccctcacggaaaacggcaatgcagtggctgaaggcaggttggacacgcctccggccggtcccagagaaaagattgtggttcccattccggacattccccagttgaaaaaccggaaaccgggggtggagtatgccttgcgcataagttacaagctgaagaaggacagggggtgggccaagaagggatatgaattggcctttgaccagctccagcttcccgtgcagggagatctgcctgtgttcaaggctcctgcgggcaaagtcagcctcagcacggacaagcataccgtttccggcaaggatttttccgtgcagtttgacgcgtccaccggggaactggcccagttcacggtaaacggcaagcctctgtttaaaacgcccatggcggtgaacgccctgcgcgccgcctccagcaatgagccgggcgtcatggccaagagcatggctaacggcctccgtgaactgaagcatgaactgctcagttacgaagccattgataacggcaatagcgtcaccgtcaagcaatccatcaaggtaagcggcaaacaggctgaaaacatcagcggctacggcgataccaagaccaccatcacggccaggaagcaacccctgaacgatacgaacacccatttcatcaataatttggaatggaccatctatgcggatggaactgtcgtctgccagtccgtactgcttccgcgcggcaatcccctggaactgctgcgcctgggatacgaactccagttgccggcgaatatggacaacgtagcctattacgggcgcgggccggaagaaaactatgcggaccgcaagagcggcatgcctctgggcgtgtataaaacgacagcctgggattctttcttcccgtacggcagaccgcaggattgcggcaaccatgaggatacccgctgggtggccgttacggacgacaaggggaacggcctgcttttcggttccgtgggcgcaccgttcgctttctccgcccttccgtataccaccacggatttgatcctggcaaaccaccccgtggaactgccgaagacgacggataagaccgttctggttctctcttccgccacgcgcggcctggggggtgcttcctgcggtcccggccctatgggcagggacatcatcaaggccaacaagccctacccgatgtccttctttatgcggcccattaccgccaagtcctacaagggggaaatccgcgtgcctgcggcccggctggatatgaccatgctgacccgcacggacaagtatacggtcaagagtgtaaccagccaggagcagggcgaagcggacgccgaattcgccattgacggtgatcccggcaccttctggcactctgaatacaataaaaccgtgaccaaacatccgcatgtactggccgtggacctgggtaaggagcgggaattctccggaatcacttatcttccacgtcaggatggcagcagcaatggccgcgtgaaagattattccgtggacgtgagcacggacggagagaaatggcagcctgccgccaagggctccttcccggacagtgctgacctgcaggaagtgaaattccaggctcccgtcaaggcgcgttatttccgcttctccgcccttagtgaggcgcaggggcgggattacgccgccgtagcggaactggatatcattcccgttaagaaataactcctgcggtttttaccgtttgaacaggcgccccgccgctctttccgagtgcgcggggcgttttattgccgggctccatgggtttcctggagggaaaatgcagaagaagatggaggatgaacaattggcagaacaaaaaaccctgtacgggaaatacccgtacaggggtttgatgaaaagggaagcttctatttccgtttacggcgtaccatcagggccgtcaaacccagcaagctcatggtggctgtcgcgggttccgggatcaaaagctggatggtattgttttgcagattgatgtttcccaggatgcattcggtgtagtagtcaagctcgtttgttagagcctgctccttggtcgtaagccacagatcgaacgtctcggtgccggatatatctatattatcgtaattaagcagactgtcgctggatacgtctttaaagacaaaaagagctgtttctccatcctgtcccgtcaccattagataaaccggggatgtcagggaagaagagtaatctccggacaagttaaatctgccgtcagcgacgccgccattttgctcttccggtatatttgtcaacgcgctggtgaagttgttctgcatgctcatcagatcactgtatttcagttgatcctgtgcatacgaattgccttggaagttccatcggctggtggtcacatcataactccaagtaccgctgctgaaggtacctaaaatggcattgcctgcattcagcggttctccgagagaattgattagggaatatgcggaggaatcgtcattgctgatattgaaactgtccgctaaggcaatttctccagaaaagagagcgcaggcggtgaaagcattggtgaaaagggagcgatagaacatggctggttatttgttggtttgatgtttgctggacaccgtgatgtaggaaggtgtcttggaagattcgtagtagatggaaaaaactccgctgaaggggatattggaaacatcctctccattgtcctgacgtttccaggaaccgttgttgttgacgaccttgaccatggcatttttgtcatctgcgggaatgttgatgacggcgtcatcaggcaattgcaaagctatttcagccaaagtctgggaaaggggcaggcgagtgtgaagaagggaattgaatgtgggaacgaccagcttctgattcttcagggatacttccccaatgaccacagctgtaacatcggaaccagctttgcgcgtaatggtcaggggttcatggctgaacaccggcatattgccgatattttccgtagatccccttcttctccattcatttccagaataataagcggcaagcttggtggttgccgaattaaagatattaaccgtgtctgcagacatggcggagccgcttttcaggccaaactggttgtcttctccaagaatatcatccagagtgcgcgccttgcgcaggacatatgaatcggggggagtgcccttgtttaccagatcagaaagaaggcggtcatccactttaatggaatgctccgtccagctggcgcccggttttttccaaccatcccggtttaagggaagagctataacttcattgccgaagtgaagaaccagcacataggcggagttttcattcatcaggtcgttgaaattaacgtccgggtccgtgatggtgactttattaccggaaatggtaatgttgccttcttcaagggtgtgctgtaccaaggcttccggatgcacccctaaacccagataacccgttgctttggcgtacagggttgtctggatatagccgcagggcgtactgtaagccgtttccgcatgcagggaggcgattgttgccggaagcaacgcgcatgcgcagagagaggctggcagacaatgtaccggattgataaacattaacccattaagaagaaaggaaatcgtttgtcaattaggaaagggggaaacattcccgtttttcatttgtcagacttttccccggatggaggaagctttcaggtttgtccgggggatggccccgggatttgaagcgcaggaagggctgccgccgcttttttcaatgcctccggaacagtaacttccaatggctggacacaggaaaaacaggacggaggcagggtggtagagatacggtgcggaacctggaaggggaaaatcatgaaaaaaagatttcaggaatgcttggcagaggaaggggtggggagagcctgaaaacaggggagaggatttaataaaattttaatgttttttccgggttgttttatttgcgccctgaacgttcttccattaggttgattccaacattcaagccggatatcattccgattcctcttttcatgttttcagaaacgcattcggacagccagcgggcggacaggattctggcctccatccggagggaggaagcccgtcccggccgcggcttgctgaaaatcttctttggcatggcgccgggagtaggcaaaacatgcgccatgctggaggcggccattcaggcggcggacaagggcgtgcaagtcattattggcgtggcggaatcccatgggagggaagatacgatgcggctcattggcaggctgccgcgccttcccatgaaaaagatggtttaccggggagtggaaatggaggaatttgatttggaggaggcattgcgcgtgaagccccagcttattctggtggatgaactggcgcataccaacgtcccgggaatgcgccacaggaaacgctatcaggacgtggaggatttgctggccgcgggaatagacgtttacaccacgctgaacgtgcagcatctggaaagccgttccgataccgttcacgacattacagccgcccccgtgcaggaaaccgtgccggattccgtattggcggaggcggattgcatccagctggtggacattactccggatcagctgcggacgcgccttcgggaggggaaagtgtacagcgctccccaggcttccgccgctctggatcattttttcaaggagtccaatttgacggccctccgggaactggccctgcgcatcgtagcggagaaggtggatcatgaactgacggaggtgcgtaccatttccggggaccgctctatctggcgcagcggggaacgtctgatggtggcggtaggccccagcccgttttccgcccggctggtacgctggacgcgccgcatggcttatgccctgaacgctccgtggatagccctttccgtggatacgggcgtacccttgcctcctgaacagcagcagcggctggacgccaatctggaattggcgcggcggctgggcgcggaagtgatcgtgatgcccggttccgatttggcggaaacgctgctccgcatggcttttttaagaaatgtcagccaaattgtggtgggcaaaccgcaggaaagctacctgtggggcctggtgcggcccatatccctggtggataagctggtgaagggaagcgaccagattgatatttacgtggttcccgccgcttcgggaccgggccgtaaccgttggaagagctggcaccggaaaacggagaaagatggccgggattactggctggccgcaggcgtgacagcggccgtcacgggtgccggcctgctggtttccgcatttaccggttattttgctcccggtttcctgtatttggccggagtagtgggcctgggctttttcatccgttcccgctgggccatgcttctggccgcggcgctgagcgtcctgttgtggaacctgctgtttattcccccggtgatgacgttcaagatagagcggctggaggacgccttgatgtgcttctttttctttttggtggccctttctacgggacggctcacttcccgcctgaggatccgcgagcgggaagaacgggaacgggaaaaaaagaccaatgccctgttcctgtattcccgggccattggatccgcttcggacgtgccttccctcatttccgtagcggcgggacagatcagccagattatgggggtgcgcctggctgtcatgacgccggaaggaggcggcggtaagctgaggctttgggagaccggcggagagtacgccatggatgagaaggaatggagcgtggcagtctggtgtatggaacaccgccgccccgcaggaaggtttacggatacgatcccggtagcggaagggttttaccttcccatgatgtccggggagcgttgcatgggcgtactgggcgtaaggccagaggaaggggagtgcctgacggccgggcagaaggatttgctggaaagcatgggagcgcagctggccatggcgctggagcgtgaagaattgagggcggaacgggcgcgtacacggcttatggaagaatcggaaaaactgcaccgatccctgttggacagtgtttcccatgagttcaaaacgcctttggccgtgattgagggcggctgtgaaaaattggccggacgtgccgtgtccgcaccggaggagcgggaagaatacggggaaattttactggccgcgcgccgtctgcgccgcctggtgaagaatttgctggatgtgagccgcctggaatccggcgctttgaaacccaaactggactggtgcgatctgggggatgttattgaaggggctctggctgctaccagggaagcacgccggaatcatcccgtgtctgtttccctgccgccggactatccgctggtgaaggcggatttttccctgatggaacaggtactggtcaatctgctgttgaatgcctgcgtacatactcctgagggaacctctgttacgttgcaaggtggtgccgactccgtgcgcggccaggtctggctggatattcatgacatggggccgggcattcctcccgaacgggcggaaaccatttttgaacgtttccggacgacgcggcccggtggtttgggcctggggctccccattgtgcgcgggttcatggaagctcagcgcggtgccgtctccctggttcccgtttccgccggaacatgtttccggcttgtccttcccctggtggagcacgatagtgttcctgaagagtaattcctcctgcctcatgagcaactttcctgcagatatcctgattattgacgatgaacggcagatacgccgtcttctgaacctgacgctgaccggcgcaggctaccatgtccgcgagtgtgaaaacgggcagcttggcttgagtgagaccgctctgaagcggccggatgccattattctggatctggggcttccggacattaacggcttggaagtgctgaaacagcttcgggagtggactcaggttcctatcctgattctaacggcttgggacagggaggatgaaaaggtggatgccttggatgccggggcggatgattacctgaccaagccgttcagcggccgtgaattgctggcgcgcctgcgcgtgatgcttcggcgcaatcgtccggaccgtgagccgtccgtattccggctgggtcccattgtcgtggatctgagttcccggcgcgtggagaaggggaaagaggaaattcatttaacctccaaagagtacggaattctgcgcctgcttctgctccatcagggcaaggtgatgacccaccgccagctgctccgtgaaatttggggtccccagcatgaggaggacacgcactacctgcgggtgcacattgcccacctgcgccagaagctgggggattccgatccggaaaaccgcattatccgcgcggaatccggcctgggttacagaattgtggcggatggagccgagtagcccttgtcccagttttactgggctggaaaaaatagcggcacattatctgcggcagccgggaaatatattttttcataacggttggagaatgtggcttaacttcacgcagtccaacatgctgtgtaggatccaagacgtattcaatacgtctttatgaagatcaagtacaacgcaagaaacgtaggagccgcagccctgggctgcgccatgatagcaggaaccgtctgcgcaggagaggaaacggtttctccgtcgatagcctccctgacaaacatgcaggaggccgccataccttcgacagacacggattgggccttttccttctcggcggggtggtccagtaagtacgtaacggaaggtctggactgcctgccgggcagcggcatctgggaagtggctccgagcatttcttggaagaatcttacgttcagcgcctggtatgccggaggagattccgccaattacgatgaactggacctggttctgggttacgcctggaatctggggaagtggactgtcaatccctggtatgagcaccaattctattttacgcaggattataatgtggccaatccggcgctgacggtctcctatgccgtaacggattggatggctgtaggagcggaaacccaggtgaaagtggaacaccaggattttgaagcctattacagcgcctttgtgcggttggagtggtcccccctggaaaatgtgaccgtggttcccatggtcaggtacgggtacaacggcggttataacgtggactatgatgacggctccaactgcattgactggagcctgggcgtgacatggcggtttgcagaacattatacgctttccggctccgtcaattattcccaggcggctacggtgctgcgtcacagggatgccggagacgaattctgggtgggattccgcctgggcgtggagttttaacggcgcaccggcgttaaaaaacgggcttccggagaggaattaataatttcttaatgtccggaggccctttgttaactacccggaatttccagaatatgcgtagagttgcgttgtgtcctcacacgacttgttaatcattgtcctgttcataggcatactggtctctttcaccccgtttctcggaaaatggctggcaagtgttttgatgggaaggcagacatggctttccccggttctgggtcccgtggagcgctgcgtctaccgtatggccggagtggaccccacccgcgaaatggactggaagaagtatttgacggccgttcttttgtttaacgccgctggattcctcgtccttttcctttccctgctgtgccagaaatggctgcctctgaatcccgccggaactgaaaatatgcggtgggatatagccttgaatacagccatcagcttcgtgaccagcactaactggcagttctattcaggggaagggccggaaggcgtcagttattttgttcaaatgaccgggctgggcgtgcaaaatttcgtcagcgccggtacgggaattgccgtcatgtccgccctgatccgcgggctggaaaggagatgcgcttctactctggggaacttctggacggatctgacgcgcagcacgttgtattttctggtccctgtttccacggtcattgctcttctgctggtctcccagggtgtggtgcagtcctttgacggacccattgccgtgccgggcatggatggcgtggaacagatgatacccagtggcccggcggcatcccagatagccatcaaacagctcggagcaaacggcggcggctttttcgggaacaacagcacgcatccttttgaaaaccccacgcccttcagcaatatggttgaaatgctctccctgcttctggccggctgcgcctgcccatacgcctatggcgtcatgatcggaagaaagaggcaggggtggattatcttcggagccatgatgattctgcttgtggcggccattgtcttgtcccagtgggcggaacatgcgggaaacccgcttttcccgggcatggaaatgctggaaggcaaggaagtgcgcctgggcgttacgaacagttccctctggtccgtcgctacgacggcatcttccaacgggtccgtgaactgcatgcattccagcatgtccccgctgggcggcgggattgccctgttcaatatgctgctgggtggggtaattttcggaggtctgggctgcggcttgtacagcatgctgatgtttgccatgattaccgtgttcctgtgcggtttaatggtggggcgaacccctgaattcctgggcaaaaaaatgggagcccgggaagtgtgctgctccatggtgggcatccttctgcccggcatggccgtcctggtcatgagcggtctggccgccgctacggaagccgggcgggcatccatctgcaatgccggcccccacgggctgacggaaatcctgtactgcttcggttcccaggccgggaataatggaagcgcctttgctggtctggctgcaggggatacgcctttttattccctgctgggcgggttggcgatgctgctggcccgcttcggaaccattatttcggtgatgatgattgctggcagcatggcatccaggaaaaccgctccgccggcccagggcaccatggggacggataacctgatgttcatggttctgctggtagccgtcgtgctggttgtaggagccctcaccttcttcccggccctggctttgggacctattctggagcatttgctcctgtattcgggagccatgctttaaggcgtattagccgataatccggatgtttatgatcatgaaggagaaaaagagtcaatcctggtatgacggagccatgttgaaaacagctttcctgaatgcgctgcgcaaatttgacccgcgcgtcctgtctaaaaacttcgtgatgtttatcacggctgccggcgccctgatggcaacgattgcccttatcagggatttggctgccgggcaacccttcggctttactttgcaaatcgcgctctggctctggttcaccgtgctcttcgccaactttgcggaagcgctggcggaaggccggggaaaggcgtatgcggacgccctgaaagaaatgcgcgtttatgtgaacgcccgtttgctgacggacaagggaacggaggaaatcgtctccgtttccgaattgcgcaaaggggacaaagtgttgtgcgaggccggggatatcatccccctggatggagaggtgatagaaggcatcgctagcgtggatgaatccgccattaccggggaatccgctccggtcatccgtgaaagcgggggggaccgcagcgctgtaacgggaggaacccgtgtaatcagtgacggcattgttatccgtattaccgtggaatcgggccatacgttcctggaccgcatgatttccatggtggagggggccagccggcagaaaacgcccaatgaaaccgctctgggtatcttgctggtggcgctgaccattgtttttcttgccgtggttctttcccttcccgccatggccggatacattgaggattctgcccgggcgcttggcttcagggcggagggccgtatttccctgcccatcctggtctctcttctggcatgcctgattccgacgacgatcggcggattgttaagtgccgttggtatcagcggcattgaccggcttgtgcgccggaatgtgctggctgtgtccgggcgcgccgtggaagtagccggggacattgatgtgctgatgctggataaaaccggaaccatcaccttcggcaatcgaatggcgaacgaattcctgcctgcacccggggtggatgaccttcagctggcggaagccgcccagcttgcttccctgtccgatgaaacgccggaaggccgcagcatcgtggtgctggctaaaaaacagtttggaatccggggccgccatatggacgcggaccatattgtttttatcccgttttccgcttccacccgcatgagtggcgtggatattgcggagcacgacggccgtccggtcgtttccatccggaaaggagcggcggaaagcgtggcgcagtgggtgaaaatccggggcggaactttcccgcaagaggtggaaatgatggtgcagaatgtcgcgcgtgtcggcggtacgccgctggtagtggcccggggaaaagacgtgctgggggtcatttatctgaaagacatcgtcaagggcggcattagggaacgctttgcccggctccgggccatgggcatccggactgtcatggtgacaggggacaatgccctgactgccgcatccattgcggcggaagccggcgtggatgacttcatggcggaagctacgcctgagatgaagctggcgcgcattcgtgaggaacaggctgccggccgcctggtggccatgaccggggatggaactaatgacgctcccgccctggcccaggccgatgtgggtgtggcgatgaacaccggaacgcaggccgcccgggaggcgggcaacatggtggacctggacagcaatccgaccaagctgattgaaatcgtagaaatcggcaagcaaatgctgattacccgcggcgcgctgaccaccttttccttcgccaatgacgtagccaaatactttgccatcattcccgccatgtttgccggcctctttgtggctgacggcatggtcagtggacctctttccgccctgaacataatgggcctgaattccccgcaaagcgccattctcagcactgtgatttttaatgccctgatcatcgtagcgctgattccgctggccttgaagggggtttcctaccgtccagcgggagcggcctccctgctgaagcgcaatatcctcatttacggggtgggcggcctgattgctcctttcatgggcatcaagcttattgatatggtcatcaatgcatggcgccttgtttgaacaatccaatcctaacctgctgaattatcatgaagtggacatttcccaatctgcgcctgtttctgtctctggccgtcattaccggcggcatttaccctttggccgttacgctggtcagcctgatttttttccctcatcaggcgcatggttccctaatccggaatgaacggggggaaattatcgcttcggagcttgtcgcacagccttttatctccgccaaatatttctggccccggccctctgccggagaatacgctaccatgccttccggagccagcaacctctcctggacttccgggaagctggtcagaacggtggcggagcgcagggcggctctgctgaaagcccacaacctgccggagaaaacgcctgtccctgcggacatgctttttgcttccggcagcggtttggagcctttcatctctccggaagcggcggaattgcagttgaaccgtgttgcctccacgcgcggagtgcctccggaaaaagtccggaaactggtgtctgcacacttcgtccggggtggaatcctgggggaaaacgtagtcaacgtgatgactctgaacgccgcgctggatacattgttcccgatgagcgggatgtaattgaccgccccggtccggaaaatatcctggcggaaaaatcgtccggtatcagccggtgccttggttccgcgtctttctccggttaccggggcggttttcttattggatttttgtcagtttggcctaatctgttgaaaaacagagacaacaaattggtcggcgttcggtatgctgccggataatcctttcagaatgcagcaatagggaggcggcatcctctcgttagttttattaggctgatatgaagtttcttcagccccaaatgcggctgtttacaaatagtcctcccttggcggtgtgaacacatcgacaacctctccgctttccatcacctcaaaggaatgaggcgtattgcccggtatggcgtagctgtcccctgcatgaagcagcacttcaatattctcctccggcatttccatgttcaggcggtattcgcctgaaatgacgtacccgcattgttcatgcggatgttggtgggtggaggcgaagttgcctttcacatagttcatctttgctaccattgatttctctccgacagcgagcgaatccagtgaaacgcccttgaacactttcttcgatgcgtcttccttgcgaacgatgattttattattttttatgatttccatatcaatacgttatctttagttccatctggatgtttccgcgttcgtatgccgggtgattttccgcaagttccttgaatcccagctttttatatgtatgtatggcaggcttgagcagggtgttgctttcaagaaaaagaattttcgccttcatgtcctttgctttgtctatggctgcatggcaaagtatttccccgatgcctttgccctgcgcatgagggtgaacggcaagtttcgccagttcataatcatataccgggtcatccattttgcagagggcacaaactccgacgggcttccctctgtaaagggctacaaagataaagcctcctttgttgataatatattcctgcggatgatcaagatagtccagatcgtgcggttctatcttccaatgttttgtaatccactgtacgttaagtaatttaaacgtatttttgtaacacggttcgtaaggaactaccctgatatgctccctttccctcattttccgggcttctttgacccgttgcagcaggctcttctcagcgagccgatcttcccattcgccgatagctctccacaaatcatggcgcgtttccttggaaatatcctctacggcgacctccacgtctttgcaaagctctgtcagcatggcggcgaccctttttccatgtggagacagggcgatgacggtgcgtctcttgtccttctggtcttcaaggcctttcaccaaccctcttgccgtcatttctccaacgatattgctcacggatggatgactgtgccctatttccttcgctatgcccgttattgttttctctttcccgtcggccaaaacgaaaagcaggggaaaccactttggccttatgtcaatgccgtataattcataaatttgacttgcatcagacgtcactgcatccgtcagcatgcgcagcctgcttccaatggctattttacctgtcctatcgaaaaaatccatatctttccgttattgaatacgtaattgattacataactaatatgccattatcatgcgagcaagcatttttttacattttagtcttcttgcaggtggagaatatctctgtatccatcaatggaatggaaaaatccgtcttctgtcagtcgggtaggccgcgaacgtggtatttggcattgccgcccttgcccacgcgattattttggagcatgggcaagggctattcctgcgtttctatccggtacggggctgccgttctttccggaaatattttccttggcgttcaggattttacactgttgccgggataccggatgcgccagccccatgggaaagcgggacaggatttccttgtcagggaggactctccaataatccgttgagcgtgcaagtgatattgcggggaatccggaggggcaaaaaatttttagataacaggaaaaatcctgtttttccattcaacggttggagttattcttatgtctaaaataccaacataccatgcttaacaatctaacaacaaaatttcaggaagcgctgatgcaggcgcagcaaactgcaggacggcttggaaaaccggaaatctcctctctggacgttctggtggcgttgctggagcaggaaggcggaattctttcccctattctccgcaaggcctcttgcgacccggggttgcttctccaggcggcccagagggaagtttcccacgaacctacccaaagcggtgccaccacccagccccagatggggcgtgacctggctacggtaatgcaggctgcggaagaagaacgcaaaaagctcaaagatgactacctcagcgtggaacatttcatgcttggtgcgttggacacgcaaaacaaagtgcaccagttgacggacacctttggcctgaccaaggataattatctggccgccatgaaggaagtgcgcggcaaccagcgcgtgacggacgacaatccggaaggcaaataccagacgctggaaaaatatggaacggacctgacggcccgcgcccgtgccggtaaaattgaccctgttatcggccgcgatacggaaatccgccgtgttttgcagattctttcccgcaggacgaaaaacaatcccgtcctgatcggggaacccggcgttggcaaaaccgccattgcggaaggtttggcgcggcgcatagtcaacggcgacgtgccggaaagcatgcgcaacaagcgcattgtttcgctcaacatcggatccatgctcgccggggccaaatatcgcggcgaatttgaagagcgcttgaaatccttccttaaggaagtaacggattccaacggtgaaatcattctatttattgatgagctgcacaccatcgtaggcgcgggcgccagtgaaggggcggtggatgcgtccaacctgctcaaacccgccctggcccgtggggaactgcggaccatcggcgcgacgacactggacgagtatcgcaaatacattgaaaaggatgcggctctggaacgccggtttcagcccgttatggtctccgagcccagcgtggaagataccattgccatcctgcgcggcctgaaagaacgctatgaagttcaccatggggtgcgtattacggacgctgccatcgtggcggccgccaccctttccgaccgttatatttccgaccgttttctgcctgacaaggcagtggacctggtggatgaagcggcagcccgcctcaaaattgagctggactccatgcccacggaaattgaccagattgaacgtgaagccatgcagcttgaaatggagcggcaggcactggcgaaggaagaagacgccgacagcaaggcgcgtttggaaaaaatcaccaaggacctggccgatttgaaggaaaaatccggttccatgattgccaaatggaaaagtgaaaaggaagtgctggacgccgtccgcagggaacaggaaaaaatagaagccctcaagctggaaagtgaacgggccaaacggatgggtgatctgacccgcgcatcggaaatcacctatggagaacttccggaggcccagcgcgccctggcggaaggcaaggaaaagctcagtaaaatgcagaaggaagatggagggctgctgaaggaggaagtcacggaaggagacatcgccaaagtggttgccacctggaccggcattcccgccgcccgtctgcaggaaggggagcgtgccaagctggtgcacatggaagaacgcctgggcgcccgcgtaatcgggcagaaacaggccgttaaggccgtatccgacgccgtgaggcgcgcccgcgccgggttgcaggatgaaaacaggcccattggctctttcctgttcctgggacccaccggcgtcggcaagacggagctcagcaaggcgctggcggaattcctttttgacaatgaaaacgccatcgtccgcattgacatgtccgaatacatggaaaaacattctgttgcgcgcctcatcggggcgcctcccggatacgtggggtatgaagaaggcggtcagctctctgaagccgtgcggcgccgtccgtactgcgtggttctcttcgatgaaattgaaaaggcccacccggacgtcttcaacgtattgctccaggtattggacgacggccgtattacggacggccaggggcgtacggttgacttccgcaacacggtcatcatcatgacctccaacatcggcagccagtatatcctcaatgaagccaatgcggaacagcgggaagccaaggccctggaggcgttgcgaggccacttccgtccggaattcctgaaccgtattgatgaaatcatcatctttgaccggctcacggcgcaggaactcaagggcattgtggacattcagcttcagcgtgtccgcaggcgcctggaagccaaaggcctgtttttgcgcatgactccggaagctacggctctggtggcggaccacggttttgatcctgtttatggagcccggcctctcaagcgggccatccagcatgatcttctggacccgctcagccttaaacttctggaaggagactttccggaaggaacggaaatcgtggtgcgggaaaaaggcggcaaactggacttcaccaaggagaaaaaataactgaaaagcatgcttgccggcgtgttgccgggagcggacaggggcgccgcgttagctgcgcccctgtttattgctccaatggtgcggaaaggccgcgtatggaatctgtgcgctcctatttcttcttctcggaatagacacggtttccgttcaaatctgcgctgagccggaaaattccggcataacgaagtagaaattgtggaaagaactcggcatatcagggctgccttcatcagtttgggaacccggctacggaatcgaggcttccttgcaagtggcggagattgtctgagtttttctcgaagaaaggtggggacaagagtagggaagagaggaacgttcaaaaaaagatgcggaggaaagaggcagtatgacaaaagcatatactattcatgatatgtaggttatgtgggtattgagggggtggcgggaataagcggacgcaaaaaagaggacgaaaaaaattgacaaaaaggtgtggtatgatagatttctcggcacgccaacacggcgacgggatgaaaagcccggcggctgaagggctcggaagagtgctggaagcggctggagccggccacccggagaaacccccggaaggggttgcgataagaagatttcaagggaatgactaccgaaaccgccgagggttttccgagggtgccgagaggtgcctgaggggtaaaagcccgaaggagcgacctagctctgagaggggtggtttggtagaagcaaggggaaagaaaaaaggtcgtgacgcgcgccgtgcgaggcagagcgaagaggccttcaagagacacaacttgaaggaagagctggctgaagcatggcgcaaatgaaatcgcaagattccatttggtccagcaatttcaaaaattaatttgatggagagtttgattctggctcagaacgaacgctggcggcgtggataagacatgcaagtcgaacgagagaattgctagcttgctaataattctctagtggcgcacgggtgagtaacacgtgagtaacctgcccccgagagcgggatagccctgggaaactgggattaataccgcatagtatcgaaagattaaagcagcaatgcgcttggggatgggctcgcggcctattagttagttggtgaggtaacggctcaccaaggcgatgacgggtagccggtctgagaggatgtccggccacactggaactgagacacggtccagacacctacgggtggcagcagtcgagaatcattcacaatgggggaaaccctgatggtgcgacgccgcgtgggggaatgaaggtcttcggattgtaaacccctgtcatgtgggagcaaattaaaaagatagtaccacaagaggaagagacggctaactctgtgccagcagccgcggtaatacagaggtctcaagcgttgttcggaatcactgggcgtaaagcgtgcgtaggctgtttcgtaagtcgtgtgtgaaaggcgcgggctcaacccgcggacggcacatgatactgcgagactagagtaatggagggggaaccggaattctcggtgtagcagtgaaatgcgtagatatcgagaggaacactcgtggcgaaggcgggttcctggacattaactgacgctgaggcacgaaggccaggggagcgaaagggattagatacccctgtagtcctggcagtaaacggtgcacgcttggtgtgcggggaatcgaccccctgcgtgccggagctaacgcgttaagcgtgccgcctggggagtacggtcgcaagattaaaactcaaagaaattgacggggacccgcacaagcggtggagtatgtggcttaattcgatgcaacgcgaagaaccttacctgggcttgacatgtaatgaacaacatgtgaaagcatgcgactcttcggaggcgttacacaggtgctgcatggccgtcgtcagctcgtgtcgtgagatgtttggttaagtccagcaacgagcgcaacccctgttgccagttaccagcacgtgaaggtggggactctggcgagactgcccagatcaactgggaggaaggtggggacgacgtcaggtcagtatggcccttatgcccagggctgcacacgtactacaatgcccagtacagagggggccgaagccgcgaggcggaggaaatcctaaaaactgggcccagttcggactgtaggctgcaacccgcctacacgaagccggaatcgctagtaatggcgcatcagctacggcgccgtgaatacgttcccgggtcttgtacacaccgcccgtcacatcatggaagccggtcgcacccgaagtatctgaagccaaccgcaaggaggcagggtcctaaggtgagactggtaactgggatgaagtcgtaacaaggtagccgtaggggaacctgcggctggatcacctcctttctatggagcaagtgcacggaagtgcacaggtcggatctcttcccgaggggagagaaagcggaacccgcgagggcccgcaacgaaccaaagatgtgtaaacagccagacgcctggagcgaaacctggcacgacgtgcgtgacgaccttttttcaccgagaaccgcaactgggggtatagctcagttggtagagcgccagctttgcaagctggatgtccggggttcgagtccccgtgcctccaccagtttcgggaaagagacccaaagccgggcctgtagctcagttggttagagcacgcgcttgataagcgcggggtcacaggttcaagtcctgtcaggcccaccaacaaaatcgattattgagggaaagcgaaaattgacatctgcgtggcaaagaaaacgattgctgagaagcaatcgctttccaacaaagtgggtagttgaacaacaactacaaaacacaagataaacatgcataccaagcaatgagacaatacagtaagtcacgaaagggctttgtggtattgtggaagtggtaacagcttttgcaatatgatgaagtaagtaagggcgtacggtgaatgccttggtgccaacaggcgaagaaggacgcggcaagctgcgaaaagcctcgggaagctgcaagcaagcgatgatccggggatatccgaatggggtaacctgatcgaggcaatactcgatcgttcatacctgaatacatagggtatgaaacgcgaaacccgctgaagtgaaacatctcagtaagcggaggaaaagaaagagaaatcgattccgtaagtagtggcgagcgaaagcggatggagcccaaaccgaaggtattccttcggggttgtaggaccacgtcatattcgaccatactggatagtagaacagcctggaaaggctggccggagaaggtgaaagccctgtagacgaaatccagagtgggaattagtggtatcctgagtaatacatcacacgtggaacgatgtatgaacccgcgcggaccaccgcgcaaggctaaatactagttggcgaccgatagtgaacaagtaccgcgagggaaaggtgaaaagaaccgctgtgagcggagtgaaatagaacctgaaaccgtatgtctacaaagtgtcagagcagagcaatctgcgatggcgtgccttttgtttaatgagtctgcgagtcagtgtttgtggcaagactaagggcttccggcccggagtcgcagcgaaagcaagtccgaacagggcgcaataagtcgcaggtactggacccgaagcggaggtgacctacccttggccaggttgaagcatgggtaaaaccatgtggaggaccgaacaggtgaacgttgaaaagttctctgatgagctgagggtaggagtgaaaggctaatcaaaccccgtgatagctggttctcttcgaaatgcatttaggtgcagcgtcacgtgctgatgcgcgggggtagagcactgacaaggctagggggcacacccgcttaccaaaccttatcaaactccgaataccgtgcaatggaacgtggcagtgagacagtgggggataagcttcattgtcgagagggaaacaacccagatcagcagctaaggtgcctaaataacgctcagtggaaaggatgtgggattacacagacagtgaggatgttggcttagaagcagccaccatttaaaaaatgcgtaatagcttactcatcgagtgatcctgcgccgaaaatgattggcgatcaagcgttataccgaagctctggactttgccgcaaggcagagtggtagaagagcgttgcatgcgcgtcgaagggcgatggcgactgaccctggagcacatgcaagtgagtatgcagacatgagtaacgttaagccgggtgaaatccccggccgccgtaaacccgaggtttccagggcaacgtgtttcgtccctgggttagccgggacctaagccgaggccgagaggcgtaggcgatggacatcaggttaataatcctgagctcgcaacccttaaactggggggacgcatgagaaaagatgactaggttattgaattccgagttgagtccacggactcagcgcatcattggatcgagtgccaagaaaagccccagcgtatgctaagcgacccgtaccgcaaaccgacacaggtgggtgggtagaatataccaaggcgtaagagtgaaacctggttaaggaactcggcaaattagccccgtaacttcggaagaaggggtgcctgcagcgatgcaggccgcagagaaatggcccaaccgactgtttatcaaaaacacagcactctgcaaagacgcaagtcgaagtatagggtgtgacacgtgaccaatgccgaaagattaaggcaaggggttagccgcaaggcgaagctctaaacccaagtcccggtgaatgtcggccgtaactataacggtcctaaggtagcgaaattccttgtcgggtaagttccgacctgcacgaatcgtgaaacgagttgggcactgtctcaaccaggcgctcagtgaaattgtagtggcggtgaagatgccgcctacccgcagaaggacggaaagaccctatagaccttaactgtaagctgtcattgtttcttcggttttaatgctcagagtaagtgggagacgctgaagacgccctttagggggcgtccgagtcatcaatgagacaccaccctttgaaactggaggatctaaccctgagccgtgaatccggccagaggaccgtgtcagccggtcagttttactggggcggtatcctcccaaagagtaacggaggagcgcgaaggtgggctcagcccggttggcaaccgggtgtcgagtgcatgggcataagcccgcctaactgtgagaccaacaagtcgagcagatgcgaaagcaggcccaagtgatccggcggtagaaagtggaattgccgtcgctcaacggataaaaggtaccttagggataacaggctgatcacgcccaagagttcatatcgacggcgtggtttggcacctcgatgtcggctcgtcgcatcctggggctggagaaggtcccaagggtccggctgttcgccggttaaagcggcacgcgagctgggttcagaacgtcgcgagacagttcggtcctctatcctctgtgggcgttggaaaattgaggggttcagaccttagtacgagaggaccgggtctgacgcaccactggtgcatcggttgtactgtcaagtgcatggccgagtagctaagtgcggacgggataagcgctgaaagcatctaagcgccaagcccttcccaagatgagttttccctacaggttcgtggaagaccaccacgttgataggtcgcaggtgtaagtgcagcaatgtattgagccgagcgatactaattaccaattgacttcatcatattacatcactccccgtcgtgaatgacaacttgctcttgtctcatttacctgtgcatgttcatcaaccaccagccacgcagatgtcagtttacgctgaatccctccccacacaaaggacggaaatcttcttagccgccacacacataccctgaaaaaaatccctcactcagaagcccccaaaaaagcagggctcccgggcaggcaggatgaagaaaaaatcacctcttccccctgaagcccggtggccagagcgcagtggtcccacccggtcccgttccgaacccggaagtgaaacgctgccgcgccaatggtagtcggacgacaggtcccgcaagagtaggtcgccgccgggatttttttccatcaggccccgccagtcacttgactcgcggggcctgttctttttcttgctcggtcatattttccactttaagtttggttatgtgatctgttgctatcttcctcgaacgttcaggagttgtccgtagggaaaaatggttgctatacttcatgaggctgccatgtctgcgtatttggtcccggaaccggcgacggcttcccggagcctgctgggtttggcgggactggccatgcggaggcgcagaaggcaggaagcctgatagaggcgggaaagggaagcaaaaaactgcccatgcgcctctgcgtcattattttcagaaaattgtttgaagaaacccgggagaaaatgattcttccgggttttctttttcctaatgattcctcggaaaactttgaatggggttttaagactgctggtcttttcctacatctccctgttcatgctcctatgggtaatagttgacggttgaaaaagaaaattccggcagctatagtcgtccctaggcaaatgcaattcaaatgattcgttttctatcctttttatttttcctgtgctttttttccgtgtgttctgcaaaagaattgaagatttttttgctgacgggccaatccaattctctgggggcggtgaagggcagccctgcttctccggagctgttaaaaaagtatgaaccgaaggagactctgtactggcatgaaaattttgggcaaagggaaggcgtgtttcccggcgcttccacatcctgggagcaggtaaggcctgctatgccgcgttataacggcaatttatgcatggggccggaatacgggtttgcctttactctggagaagaatggatggttcaaggatgcggacgttgcggttgtgaaagcttcccgggacggcggcgacaattcccattggcggaaaaacggccaggcttacaggacgctggtgcaggccgtcaagaatgcctgtgcgggtgtggacaggtccaagtattccaaagtggagtttgccgggcttttgtatttgcagggggaaagcaatgccggaacttccgttccggagagcgcttcccgctttctggaacttctgggcaatctggcggcagatctgaaaccgtacggggatacatctgcactggccgcgcagaaagccgtccttggagaaaatgccaattgggccggaaagaatgaatctgatccggaaacgggtaaccttaccggcggcctggaaggacgcgatacggaagttcagggaaagacaacccgccaggtgatgaaggatctggcggaatcccgtccatccctgggctatgcccctacccgagatcttcccaaactgaccgcaggagatcaaatgggagtgcattacagcggccagtctcagatcagcataggagcccgttttgcttatgaagccgcccggctggccgggaaggataccggctccgtgcgaagcggtcgttacgatcttcctctgggttctccggacgcgtggatgaaccggaaaatgccggggaagaacgtatgtgtgtggaatgtggcttcttccgtaaaacccagcctggtgtcaggggtggtgaagttgtttggaatccgtgtggaggatccggccgtcaagactgttatcgtccggagtaagggaagttccggagaccgtttggtaatcgggccgggaggtattcgcctggcggaggggaaaaatttgcagttgaggacgaatgtacagctggcgggccggcagtcctggaatattccgggtggttctgccgtggagattaagccctcgccggttcaggaaaaagccatgcctgtccgtttgtccggccaggcggaggtgcatgtaacccaagcggaaggcggcggagaaacggtggaagcggcccgcgtcgtattggaacaggtgctgccctctgccctgaaatgttcctggacgttgtccggaaaggtggagatgactttgaagggtatggaggggaaggccgtgaatttgggcaaagtcttcgtcaagcagggcgctgtgctgaatctgaatggctccagacctgttgcgggcagtgtcgttaatcaaggcggcacggtgaatccgtaatcaatagacctggtacggtccggaatgcttgccgtattttttagtggaggaaggaggttaaaaaatacgttttttcctaccggaagggccatgggcttttttcttattcacaggagcggagcggcctggaaaccgaacaggggcatgacctgcggcattttcaccccggtttattcacaggaagttctgcttgggaagcattgatcatcaagtctactgtactatatttggcgtactttttcctttatggatgcgttatgtagtagtatggtcgcgccatgagatgcgttcagtgcggtcatttggaagataaggtcatcgactcccgtatgtccaaagacgggacgaccattcgccgccgccgcgtgtgtttgaggtgcgattaccgttatacgacctatgagcagattgaacgcacggagttgcgcgtagtcaaaagggataatctgagagaagccctgaatcgtgaaaagattttacgcggcctggtaaaggcgtgtgaaaaaaggcctgtcagcatggatcgcctggaccgcgccgtggaagagatcatttccgaattgcaccgcgaccatttgcgcgaagtcccttccagcgagattggcaagaaggtgattgaaaaattgtatgccatagatcccgtggcttatatccgctatgtgtccgtgtaccgccagttttccaatgtggaggagtttatccaggagattacgcagatgcgccaccagacgcttattgatcccctgcagcgcaagcttcccattctttaaatttcctgttccatgatcggcttccgaaacaacagaccgttgctcaagcttggtgattgcctgattaccgagtacggggaacaatggctggcggatgctttggagcacgctgcccggcgtgccggaacaacccttccgttcaaggaagacctgctggcttccgtgcgttattatctggagcatgagtgcgatttgtccgtcatgaaggtgtccgagctgtatgcgcgtctgcgccgcatgctcacggaagtgggcctggaacaccttgcaagggagcttagggaggagatgccgcccatgacggtctgcgtcgcggagattgcccgcagcgtgccgttctggctgttttttgcctgcgagctgaaaaagcaggtggaggaattgcgggggcatggcattaccaggtattgcttcacaggcaggaaggaatgcgtgatggctctccggggaaggaagcgctgggaccgttcctgccagtctctgctggaagacctggactttcttctttcccgctatgaggagcaggcggcggattgttaacgggacttatccgtgccgtattggggtattcagctgcgcaattcaacaggttcctctttcccgactgacggagccggttcggagtgcggcacgtttctgcttttcgtgagcatgcgaggctatttcattttaccgggaacgggcttgcggggcccgttgatccatgctcgggcatcctgttttgccggaaggcccaataagagttaacaggccgtattgtgccgcctgattcccggagatgagccggatgagggaatgcaaggggccttccctcattttccccgaggttgttatttctggctgtttgcagcaggagcagcctcacccgtaccggaaggccgtgaataaggcagagtgagatcttgctccctgaccgcacggggggacggccgccgttacaggtgtttgggcgcggggccgttgatgattttgcgggcccggttcagggcggcgtcaatattctcgcagatattgtagcgtttcagctcccggtaaaagggcgcgtggcggatgacgtccagaggctggggctgcacgccgcaaaccagcagggtggaaccgtgttcccggcactggtggcagaagtcggaaaggacgttcaggccggtggcgtccagcgcgggaaccaggcgcatgcgcaggataaccaccttggtatcatgttccagcgtttccagaacctggtccttgaattgctccacggcaccgaagaagaagggacctttcacgtcgaaaacttccacaccttccgggatgtccagcttggcggcggagcggttcccatcatcttcctcatcattttccagcagttcgtttttgatggcggaaacatcgctgatttgggccatgcggcccatgaagagcagggcggccagcaccacgcctacttccacggctacaacgaggtccacaaacacggtcagcaggaaggtgattaccagcaccgccgcatcctgcctgggccctttcaacagacggctgaacgtgtgtatttcactcatgttgtagcacactaccgtcagaatgcccgccaggacagccaggggaatctgctgggcatagtgggcaaaggccatcagaatggccagcagggtcagggcgtgaatcataccggaaaccgggcttttagctccagccttgatgttagtggcggttcgggcaatggctccggtggccggaatgccgccaaacagggcggagccgatgttgccgatgccttgtgcaatcagctccatgttgggcttgtggcgccctccggtcatgccgtccgccacggaggcgcttaacagggattcgatcgccgccagaagcgcgatggtgaaagcaggggccgtcagcgcccccagggtactccagtcaatgctgggcagggagggcagggggagcgtattcgggaggctgccgaaggcttgcccgatggttgtcacaggcaacgaaaacgccacggaaacggccgtcatgcccagcatgcccaccagcatggccggtattctgggccagaagcggcggctcagcagggtaataattacggtgccggcggccagccccagcgccgcccagttgatggtgtggaagtaatggaagtaacacgcccatttttcaatgaactctccgggaattttttccgtgatggtgaggccgaagatgtctttaatttgcgtggaaaagattaccacggcgatgccggaggtgaaccctgtggtgacagggaatggaataaagcggatgagcgcccccatgcggcagaacccaaagatgatgaggaagaggcccgccatcaatgtgcagaccagcaggccggatgcgtggtattgctccaggacgcccatgatgatgatcacgaaggctccggtggggccgcctatttgatatttgcttccgctgaacagggagatgaggaacccggccacaatggcggtgatgaggccctgggttggggagagtccgcatgcgatggcaaaggccatggccagcggaatggctactacaccgacggtcagtcccgcaaaaaggtccgccagaaaggtttgtttggtataagttttgagagaggagagaagagcaggtttgaacatggctgccgggatggttggccggctgcggttgtggccgccgccggcggggttgaagcgtccccttcctgcacccggaggcgccccgcggagacggacggcaggctctcttcgtttccgtccgcctccgcaggcggcgttacttggaaaggatgccttcccagtaggcgatgcggcggcgcgtgttgtcggaattgggagcccccgggttggtacgctgggcgaaggcttttgtcaattcaaatacgtcgcgcgcgtctgttccatatgcatttgaaatggaggcgaattgttcgtcgctcagcttgttgagcggcgtacccgtggagatgctcatggcgactgccttcccgaccagctcatgggccttccggaaggggaccccgcggcgcaccagataatccgccaggtccgtggccagcagcatggggtcggacgccgcttccctggccctggccgtgttcaccgtcatggcggctatcatttccgcattgacgtccagggccagtttaaccgtatcaatggaatcgaacaggggttccttgtcttcctggaggtcgcggttgtaagtcaggggaagccctttgacagccaccataacggcggtgaggttaccgtacagccgccccgtttttccgcgtgtgagttccgcaacgtccggattttttttctggggcatcagggatgaacctgtcgtataggcgtcggacaaggaagcgaagccgaattccgccgtgcaccacaggatgacgtcctcgctcatgcgggagagatgggctccgaccacggccaggtcaaaaaggatttccatgatgtaatcccggtcggcaatcgcatccatggagttttctgtaactgcgtcaaaacccagttccacggcaattccgtggcggtccaggcagatggtggaaccggcgatggctccggaaccgagcggggagacgttcaggcgcctgcggcagtccttgaggcggtccgcatcccggtccagcatttccacgtaagccagcaggtgatggcccatggtgacgggctgggcgcgctgcaggtgagtatagcccggcatcatggcatccgcgtattccttcgccttcatgaccagcgcgcgctgcagatggcgcacttttcccagaatttcatcgatttccgcccggcagtaaagccgcgtgtccgtagctacctggtcattgcgggagcgtgcggtatgcagcttggcgcccggagcgccgatgcgccgggtgagttcgctttcaatgttcatgtgcacgtcctccagttcccggctccacgagaagttgcctgcttcaatgtctttcagtatgtctttcaggccggattcaatggcgttgaattcttcctgcgaaagcaggccagccttgagctgggcccgcgcatgggcgatggatccggcaatgtcctggcggaaaagcctccagtcgtaggagacggattcgccgtagcgttgaaccagatcagcggtgggtttagaaaatctgcctttccacatgacccacatgttgtgccccaggagcttccgttttgaaagcctgaaatgggtaatggaggcagattccgcggaactgggaaaaatccgcatgcctggaaaaccggagtggagccggaaaagagagaaacggagcatggctgtcttttccctgtggcggacgggggcggatatgttattacgatgccgtgcgtatggatgatgaaatgcctctgaaacgggaagatttgcggaaacgcgcgaaggaaaaggcggcggaactggctgcagaggggatggaactgcgccccgtaacggtttccgggcgtaccctggcgaaaaggttctgggggaaggaatggatgaagagcctgtctgcgtgcgaggtgtacgggatgcggctggcccccggccggacctacctgcgctatggctgtgttctggaccttaaaacggttcccggccgcatcgatgctctggtgatgggtgaacatttgtatgaggtttgcatccaggcctcccccccggatgaagaggcgcttgcccggctgcgcgcacgatgcgccgggcagattggttcctggattgatctgctgaaagggaatttgtctcccgagctgctggaaatcctgtgcgctccggaaggcggcctgtttcccgcgccagaagagtggcgtttttcctgttcctgtccggattgggcggatttgtgcaagcatgcggccgcagtcctgtacgctttcggcgtgatgctggataagcagccggagttgttgttcaccctgcgcggaatggattcctccgttttgattccgaaagctccggaacccgttcccggaggagaagacgcactggatgtggatgccagttccctttcggatatattcggcatcagcctggattgattattgccgccgtgattgtggctttgttccggttttgaatagccaggagggaaggggatggccgtcctttttcatgaactggcggcggatgagagtgtccgggcagtcaggcgtgccgttggccgtctgccaatgtttccgcatgatgctcgcccgggtggagaatgttcccgctttttccatgatgcattgcaggttcgggagggcggaaaaaacgagataaagaaccaggagggtccggtatttcacgcctccccggcggagggcccggagaaagagcagggaaaggaagggatagaggacggccggagctttaaagagaagttcattgttcatgatgcccgtgcggaaaaagagactgcctgccatcatgcccagcgtgatgtagtacaacgggtttttccggcattttgggaagaggagcgcccccggcagcaggatccccagggtcagggccagcaggaagctggcgtatttggcggaaccgggatggagcagaagccgctgctgcccgtaatggtagatttccgcatattttgcgtcaaacaggcaggaaaattgccctcctccgtccaaatgggaataaaagacggccatgacggccgtgcacagggccgcgagccagaaaaccggctggcccagaagggaacggagacgggaaagaggtttccgtgccgacgagcggcggaacagggtttcatacgccatatacggaaggagcagaagggcgcccagcggggaggacggcagcagaagcgttcccgcgagataatacccggagggaggcagggagcgcgtcaggacgaatacggcgcacaatagcgccggaacggcgtgattgaatgtgttgaagagttggacgggcatgccgataaacaggaccatctgggcattgtattccgcaaacagggaggagaggggaattcccaggcagtccggcaccgctgccggagagccgaggcagaggaggatcagcgcccagcgggccgtcttccggattccccagcggacggttgccgccagcagcgccagttccagcccaagaaaggtccacagggccagcagccagggagcccatgattccgggcagaaagaagccgccagcgccggaggcagccaatggcccaggtagtagatgaaatgatgtccgtcctccgtgacgaagggccaggaatttgctgcaagatgttcgtaaacggcattgcggataataaaatccgcgtgttgctggcagtggcccgtgaatccgcacaacagcaccagcatcaggcagaagaaggagaggaggcccagcacggccaatccgcgcccgcttaacggaaacctttgtgccggaagatgccgagcgcaggcgtacagcccgcatgccagtgcggcgcaaagcggtacggaaaaagccggatgcacccatcccagcagaaaaaggaggaggggcagcgccaggtacaacaaccccgcgcatagcggaaggcgtgcgggaaggaagaagcgggcaggcatgacgcagagcggaaaacttatcggcaggggaggactccgaagggccagcatggcatattttgtttcaaagaaaaggatgcagttgcctccggagatgaaaaatccccgcaccgcctcgcggcggccggggtttggcgttgcttgataccagttccagcaaaaaggtcagaacaggccgaatccgttgccgtagcgggcggattctcccagttcttcttcaatccggagaaggcggttatatttggccatacggtcggaacggctcaaagagccggttttgatttgtccggcgttggttcctacggcaatgtccgcaatggtggcgtcctccgtttctccggaacggtgggaaataacggcggtatagcggttgcccatggccagctccacggcgtccagcgtttccgtcagcgagccgatttgattgaccttcaccaggatggagttccccacgcccagatggatgccttttctgaggaattccacgttggtgacaaagaggtcatctccgacaagctgagtgcttttgccaagtttttccgtcaggattttccatccgtcccagtcgttttccgcacagccgtcttcgatggagacgatgggatattttttcttcagttccacatagtagtccgtcagctctgcggcggttctgcggctgccgtcggatttcttgaaaatatacagcccggattccggttcataaaattcggaggaagccacgtccagagcaatggaaatatcctccccgaaccggtaaccggccttgtccaccgcctgggcgatgcaatccagggcgtcttccgcagagttcagcctaggggcgaagccaccttcgtcgcccacggcggtggaaaggccgcggtcatgaagaacggatttcagcgcatggaaaacttccgcgccataacgcagggcttcccggaaggtgggagcgccggacgggacgatcatgaattcctggaaatcaataggcgcgtcggagtgggcgcctccgttgatgatgttcatcatcggaacgggaaggatcttggcgttcgggccgcccaggtagcggtacaggggctggtgcagctgggccgccgccgctttggcaagcgccagggaaacacccagaatggcgttggctcccagtttggccttgttgaacgtgccgtccagggaattcatgagggcatccgccgtggtttgttccgtggcttccagaccgatcagggccggagcaatgacgttacggatgttgtctacggccttggtgactcccttgccctggtagcgggttgtgtcgccgtccctgagttcccaggcttcatgttctccggtggaagctccgctggggacgcccgccgtgcctacggcgcctccttccagataaacgtccgcctcaatggtggggttgccgcgtgaatccagaatttcacgccctgttattttcgcgatgcgcatttctttcataaaaatcggatggttttttccttggaaaccagatattggaattagtttaaactaatttacaaggtttgtgtatcccgtatccggagcggatgcaagctttttctccgggagaaagaccggagttcaatcagtacggaaaccccttggcggcggttcagttgcggtaatgttccttcagccacgttatttcttcgccgtgcccggcgtcgtccctgggcgtttccaggaaaaagggcaattcccgcagaacgggatggttgatgatgttgatgaaggcctgttctcccagggaacccttgccgatggtttcatggcggtccttgaaggaggaaaagggtgtcatgctgtcattcagatggatggcacgcaggcgttccagacccagcacggcatcaaaatgttccagtacggaatccagcctgttgacgatattatatccggcggaatagacatggcaggtatccaggcatacgccaagtttgtccttcaggtccacccgctccatgatggcggccagttcttcaaaggtccggccgacttcgcttcccttgccggacatggtttccagcaaaacaatggtcttctgttccggcgaaagcacgtcgtttaattgatccgctaccagttcaatgcctttttccactccctgccctacgtggcagccgggatggaagttataaagatttcccggcagatgttccatgagttccagatcctctttcagtacctgggccgcaaaacgggcgacactggggtctgcggaacaggggttcagcgtgtagggggcgtgtgccagcagcgtgccgaatccgttattccgcgctaattccagaaaacgggcaatatcctgttcgtcaatagctttggctttgctcccccgcggattgcgggtaaagaactgaaaagtattggcgccgatggagagggcaacccggcccatggcttcatagccttttgcggaggagaggtggcatccgatgtatggcatggcggtaagttcggaatggaaaggaagtttatcaatgccgcagagaggaagagaggctaaaaggcctgcatgacttgatcggaaagaataagaccgccaggaacgtacgaggagttaaaacgatagtgattgttggtaatgaatttaaaccagttgattaaggcggccgtattgggaggggccctgtgcacggcctgttttgcaggagccgggccgaagggctgtttaacgccgttaaagcctgttccttccgcggagcagcttgaatggcatgacatggagatgtatgcctttgtccattttacgattaatacctttactggaaaagagtggggctatggagacgaaaagccggagctgtttcatccttccgatttcgatgcggatgatcttgtcaggacgctggcggacgccgggttcaaaggggtggtgctgacctgcaagcatcatgacggtttttgtctgtggcccacaaagacgaccctccatagtgtagcggcttctccgtggaagcaggggaagggcgatgtggtgaaggaggtgtcccgcgcgtgcggaaagtatggcgtcaggttcggtgtttatctgtctccgtgggaccgcaatgccgcctcttacggaacgccggattatatccggatgtaccgtcagcagttgaaagagctggcgacgggatacggttccattttcctggcttggtttgacggagcgaacggaggggacgggtattacggaggagcgcgggaaaggcgttctatcgaccggagcgcgtattacgactggaaggcaacttgggatgagttgaagaaacggcagcccggagccgtcatcttttccgacgtagggccggatgtccgctgggtaggcaatgaaagcggctatgcgggttatccctgctgggccacatacacccctgttccgctgcaagccgggacggaacccgcgcccggcaccgtgcgctaccggctgggcacggaaggcaccatggacggcaagtactggattcctgcggaggtggatgtttccattcgtccgggctggttctggcatgagcatgaaaattcccgcgtccggacgccggaaaatctgctgaagttgtattttgacagcgtaggcagaggggccaatttgaatttgaatgtgccgccggaccgccgcggccgcattcatgaagaggataaaaagtctctggcgggcttccgtgtgctgctggatgagttgtattcccgcaacttcgcctccggcgcacaggctgagtcctcctcttcctggaaggggcacggtgcggaacaggttctggaccggaaacggacgacgtactgggtggccgctccggaagataagcatccctgcgtggtattaaaattgccggagcccgcggcgtttgacgtcatccggctggcagagcccattcaactggggcagagggtgcgcaaattccgtgtggaggtgcgtgagaacggccagtggagcaagtggacggagggggccagcataggggccagagttcttctgaaaggaagacccgtgacggcggatggagtgcgcgtggtgctggaacaatcccgggccgttccggccctgtgcgaggtttctttatggaagtatcccgtcatcctgaatgctccggcggtgaattatgaccgcaatggacgggtgaccctggcttccgcggagaacgtagtgatcaggtacaccacggatggaacggaacccggtccgcagtccgccatgtacaggaatcctttctttctccctgccggggggacggtgaaagcggcgtccgaatatcgcggcagaaaatcttccgtaaccactcagattattcctgtccccacgcgggactggaaagtggtagccggggaaagaagcgccgccgctccggaactggctatagacggagattcttccaccctctggcatacgcatgccgcccagggagagttggcgcccccgcaggcgctggagatcgacatggggcgtccggttaacgttgccgccgttatctatacgccgcgcagggattccgcaacgggaacggttgaccgctatgccgtctatttgagcatggatgggaacacatggggggctcccgctgcggagggggagttctctaatatccgcgccaatcccgttccgcaacggattgacctgaaagcgcctgtcaaagcacgttatctgcgttttgtaggcaagcgggtggtggaaggcagccatgttgccgttgccgagctgggcgtattgggaaaataagcggtttcctttttttattatcgtagtcctccggcgttttcttgacggatggagggaagaggggcaagatggcacgcatggaacaagtcagtctcatggagttgggcaagctggccgcggaaggccagattgaagcggaagtttttgcccagattgcccagtgcgcgcagaagatgaccaagggcaacaagccgtatctggatgtgtcttttgccgatgcggaagggacaatgggactgaaggtgtgggaggataaaccctggttccggacgctcgcttctctgcccctccgcagtttcgtgagcctgcgcggccaatgggccaagggagggttcggcatggaagtttccgatctggacgtgcggttgctggacgaacaggaaaaggaaagctttctggccggttccggaaccttgaagaaaaagcaggaagctgatctgaaggaaatttgcgtgctcatcaagggcatgaatgatccgcgcatacgcgccctgtgcattgaattcattgagcagttcggggaacgcctccagcgcgccgccgccgcccgcacctaccatcacgcccgccgtggcggactggtggagcacgtagcggggatgatgcgcacggcctctgccgtctgccaggcaaatccggggctgaaccgtgatcttctgctggccgggtgtctgtttcacgactgcgggaagttgtgggaaaattgctacccgaaggaggattttacgatgccctattcggaggccggagaactgctgggccatattccgctgggcattgaactggtcaacaatttgtggaagcgcatcatgtcccttccggaagcggattcctggaagacgctggaccctccttccccggacgtgcgcatgcacctgctgcacctgattgcgtcccaccacggggaacttgccttcggttcccccgtgtttcccaaaacgccggaagcggtggccctgcattacatcgacaatctggacgccaagctggaaatgttccgcggagcttatgagacaagcgaggccctggctcccagagtgctccagcgcaaggcccccctgcctgccaacgttgttcttccgctgccttccgtcctcccgctggagccggatggtgcggatgccatgccgtaaggttcaccctgcatggaagaagttcggcgtgttctgcgtccgtggccggaacggatgacggcatctgctcccttgctgattccggctttgtccctgctgtgcgcctgcgcggcaatggatgtttccctttggttctggattccatgcttctgcctggcgtcgctgccgtgttttttacgtgcgccctccatgggggtgcttgccgttgccctggcgatgtgggccgccgtatatcttttcgcgtatgaacgggaatacgcaggcgttcccgtggaagcggggagagtcatggttatggaaggctccgttgaggctgtttccggaaaatccgtgttgtttcgcccggatggttcccggtggctgtacgcggtttcctcccgtgacggggcctgccctctggaggcaggggaacgctaccggatcaggggagaggcgtatccgcttcaggcgccgtgcggtcccggcatctttgaccgggagcgttgggggtacctgcacggcatcatcgccggaatccggctggatgagtactgccggaacgggccgggagactggcgcagccgtttccgggctttttccctgcggctccgggaaagggctgcctccctgctcagggagggcgcccctccggatgatgaggcccggcaggtgatggtttccgccgtgcttggggacaagacggacgcgaggccggaaacgatggcgaagtttctggaaagcggctgcatgcatgtattcgctgtcagcggcatgcatgtgggcgtggccgccatgctgtttctgggtatgctgaggcttttgcatgtgtacccccgtgcggcccggctggcctgcatccttttgctggcggcgtacgtgttcgtgaccgggatgtccgcttccgccctgcgggcgttcatcatggcgacagtctggcttctggcgtttgtgctgcgcagaaagggacatccggccaatattctggcgctcgctttcatcctcctctgtttaatgaacccgctccaggttttccagccggggttccagctttctttttgcgtttttgccgtcattgtctgcctggcggaatggctcagccgggaaaagcccctgtggtcgccggacccgtttattcctccccggatttatcatgcgcgggaaagattcctggtgcggctggaaaaagcatgccgcggcgcgctgatcgtctccgtgggggcgtggctggcttccattcccctgacggcatggcacttcggaacctggaacctgtatgctcccttgaccaatttgtgcctgagcgtacttgtctttccccttatgggcatttccctgtccgggctgatgttcgcgtggtgcccgtggatgctgcatgtctgcaatacggccgcttcctggctggcgtccgccatgttgtccgtagccgggggagtggcttccctgccgtacagttatctttcttccgcaccgccttccggggaaaatgaagctgttatcgttcccttgcagaaggatgcctgggccacagtcatttccaatcccgcattggttgtgggaagcggaacggaagatgcggtgcggtacaccctccttcccgtgctgaaggcgcgcagtgtccggccctgcggcatgctgtcctggggaaacggcaaggcggaacgggccggagagaaagaactggagaaggaatatcccggaatccggaactggggcgcggagcccggggaatgtcccgtccggcaatggaggttacggccgggcaatgcacttgtgctggaagattttcctgtcccgttgcgcacgggaatccgtcaggaccggaaccgggtgttgtcatgggaatgccgcgggcggcggttcctgatgatagggaataccgggttttcttccctggcgcgtgcggagaaaacaccgcgggcggacgtattgctcatcgggcatcatccgcgcgacccggtggacagcgcggcgtggatcagggccacaggcgcccgcgcagtcattttcacgacggagcatgaatgccccgtaccggagggaacagccatataccgtctccgggaaaccggaaccctctatctgcggatggaagaaaagggcgtgcaaatcatcccctggaggggcatggaacgccgtacagagtaaatcccgtgctttcctcaatgcggatgggaaggatctctcccgccaggtcaggggcggcatccaccatgacgggcttgttctgggaggtccggccggagaggcgtgccgcattcgttttggacggcccttccagaagaacttcctgcacggtgcctaccagatcccggtttttccggatagctatttcattgactacggccagaagatcctggttgcgcgcttccttcacttcttccggaatctgattctccatcacggcggcgggtgtgccgcggcgcggggaatagcggaaaatgaatgcgttgtcaaactggacctgttccacggcctgcctggtcagcaggtaatcctcctccgtttctcctgggaagcccacaatgatatccgtggtgatggacaaatccgggcgtgcctgcttcatcagggagcaaaggtccagataggtttcattcctgtacggcctgcgcatcattttcaggatgcggtcgctgccgctttgcatcgggaaatgaatgtggctgcacaacttgggaaggtaggtgaacgcctgcaccagatcctggcggaaaccgatgggatgcggggaaacgaagcggatgcgccggattccttccacttcatgcacggcttccagcagctggacgaagccgcccttgccgcctgccgtttccatctgcctgccgtaccggttgacgatctggcccagcagcgtgacttccttcacgccggcgtccgccagcatcttcacctcatccaccacgtcccggatggggcggctgcgttctgcgccgcgggtgtagggaacaatgcagtaggcgcacttcatttcgcacccctgcatgatggagacatacgccgtggagcgcacgccgggattcaggtgatcccggattcggttctgggaatcctcctcttccgccacatcgcacacatgcgtaccggaaaaggcggtttgcaactcatccatgcggcgttcctggcgcgcgcgcagaatgccgtccacatgttcaaacacgcggtggtatttctgggtgccgaccacgaggtccaggcgcggcagttccttgaacagttcctcttttttactttgggccatgcagcccatcatgccgtacactacatgcggacgatgccgctgctgcttggccagaagccccatttttcccagagccttttgttccgcctgttcccggatggaacaggagttgaacaggatgacgtccgcctcatcctcgcggtccgtcatggtgtagcccttctgcacgaacatgcgggccacctgttcggagtcccgttcgttcatctggcagccgtaggttttgatataaagcttgggcatggaaaaaatcaggtattttttttcagggtgaccacgcattccagatgcttggtctgggggaacaggtcaaagggctggacggcggtgacggaatacccggccttgtcgaattccgccagatcccgtatctgggtggcgggattgcaggaaacgtaaacgacttttccggggccgaaggcaaataactgggccaaaaatcccgcactgcatcctttccggggagggtcaatcaccacggcggtttttcctgcagggaaatccacctgggcaaaaatggctccggcgtccgccgccagaaattccgcgtgttcaattccgttgctgcgggcattgctgcgtgcccagtccgcagaagtctcgctgacttccacgcccaacacttttttaaatttcttcgccaggctcagggcgaacaggccggaaccgcagtaggcgtccaccaggaattcctccccgtccatactcgcctgttgggccacgtaatccgtaaaaagcggaagaatgaaaggattattctggaaaaagtctcccgccagaaaatggaattccaaatcgcccacccgttcgcaggcgacggcattgttattagtgatgacggttccttccgaggcccggagcagaatggtggctccccgcttgaaccgggctgcggcctggtaaacgcttttgcgggccaggggcagggcttcattgatgtactccatggcaatcgggcattgcggcacgtccactacgtcccttctggagcctgctttcaggaaaccgatggccggcttgcctccttccttcggcttgtcaaaatgaggcgtaatcttggagcggtaatggtattggcggggagaggctacggccggattgacgggcagttccagccctgcctgcaagcggagcagatccgctacctgccgggtcttccagagaagctggcggtcataggaaaaatgctggtactggcatcccccgcaggttccgaacaggcggcagcccggttccacgcggtccgggctggggttaattacttccaccagatcggcggaggaataattcctgtcattacgccagacgcgcgcttttacacggtctcccggcagggcgaaggggacgaaaaccacccatccgtccacgcggccgatgccgtcgcctgcattggaaagggcgtcaatatccagttcaagctcctggtggtaggaaaaaggttcggggtggaaacccttgggaatggtcgcagtcatggtggtgggaaaagattatggggcggaaggggtaatcaacttgccgtccagatcgtacaacagggtttccggcagccggggggtgcgcagtccggggcggaaatcgcccggcaagacagccggtcccggtgcggattcttcattctcatcctctggaagaatctcctgttgcgccggagcgggcgcccagggtgcgggctggttggctgaagcggtttgttccggctgaacggcaggaactggggcggggtcctgaggagccgtttccttgttggaggcgcaggaagaggtccaggccagcccggcaatcagacaggagcggatcaggagttttctcatagcgcggattcttacagcttcatccggacttggcaagtgaatagccctgctatgaaccgtgtaaaaggcatttcttttttacttggaaaccggggaatgcttgctgtttgactcttccaggatagtgtttatagtaggagcacgtatgagattttttctttctttgtgttgttccgctgcggtttcaggggtgtttgccccacaggccggcgtggcgcaacagcttcctcccattttcgggtttgccaataaagacaggatacctgaagttaataagtcgggcagtcccgtttttgacaaactccgtaatgaagctatgaagaaaaaactgccgctggtaatttatcttactggttcttcgtggtgttcccagtgcaatatttttacccgggaatatatcaaaaaaacaaatttcaaaaatgccgccggggaaaaatttatattttggctggtggataccaaacaggtgccgggcaattctccagggacgtttaaatttaaaatggttccggaagaagccgcaaaaatcgtggggtgtgtggattctccccgtgcgccgtatgtggttcttggacctcccgccgtgtttatcattgatcctgtttccggaaaattgatcaagagcctgttctccaagagtgaagtggacaagtatggaaaacctcttgccggaattattgaagaaacctgggcggagttttcccgcaagcccaaataggaaacggaatgtatgcggggaacgtccggtattttcatgctccagccaagatgacggggaacaattccaaaagttcttttgtttattttataggaagcgaaaaaatcctcctggcatccctccggctcctttaaaaaaggcagcgtgcggaatctttttctggggcggagcgattgccgttaaaaacggtaaatgcagcgcagccatgggcgcgacgtgccggaatagtagggataccaccggtgtccggggtggtgcatggtgcggccccattcatcctgacggcgcgcctggggcgcatagaagagctgcttccactcccggctgacgaaggaagaaggctctgtttccgaagccggaggcgccagaaacgcctggagggcgctggaagaacagcaataatagggaatgttgaaccggggcgccattccgaacgccagcagaagccatatccagacgcggaaaccgggatgtcgcgtccaggaggaagccagaaaggcaagcaggcaggccatgaccggaacgcttcctttgcaaagcaggtcattgacgtctccgttcacgtaaaaaaaaggcagaatcaggccggttgccagagtacagataaagaggggattcctccggaaatcccgccagcagaacagggcgtacagcaggaatgaggtcgccataagcgggaaatcccccggatgcgtataaaaaggccgcatgcccatgtgggaggatggcgcgtttaccgtcccataataaaggaggaaacacgctcccagcagaacggaggccgaaaaggagggatggagcaggacatcccggagaggggggacgcctctccactgacggtaccactggcaggccgccaggggtagccctccgagggccgcgaggggggaataaaaggccgtggctgcgaacagaaggggtatccagggcaggggcatgcgtcccgaagccaggaagatgaaaaaaagcagaactggaatggaagcgtttgcgctgcacatgatttgttccgccgtgccgaagtaatgcaggcggaacaggtccagccccagccagcactggatattcagcagagaaccgaatgccgccatcagcagggcgagcagcagggagcggcgtccggagaaaacgcagagccacagccaggtaagaaacagcccccaggttccccacagaacgacaaacacgcgtgcggcgtccagccccgccagttttcccgccagggctgggaccagccagaaccccgtgttgtaaaccagcatgttcccgtccggaaagatgacgggccatgggctggctaccaattcacgcaggcaggcgtttctgacgatatggtcagggtgctggttgacccattccccccagccggaaagcgtcatcagggcggcaaacgccgccagggcgagaaatgaagagcgggtgaacagggggaaggcgggaagggaatcccttgtttgcggttccttgcattttcggggcgccagtcccgcagccgtcaggagcatgagggggagagcggcgtaccagtgcatccacccggccaggaatatcaggacgggcagcagaagccaggcgcaggtgtgccacttcagcgcagttgcgttgaacgcttgttccgggcacggggcatcagcggcagaggcaggcatttcccctgaaccttaatggggccggcccgcgggggcaaggaggaaactcgcaggccggaatggaagggggcgtttgtatgggtatagtggcaggaatgagggtgcgccgttgccgctttaccggagaaacgggggcctcatactgggaggcctatgaataaaacacaatttatccgggagctccagcgtgagctggggaatgacgttacttcccggcaggcggaacatgcgttgaacgcggtgctggagacgattgcgcggtcggtccggaggcggtcgctggtgaaattccggggctttggcactttccgcgtcaagcggcgccgcgcccgcatcgtacgccatccggaaaacggcggcaggctgctggtgcatgaatcgaaaaccatgaaattccgcccctcttcccttctgtggaaggagtaggggaaacgctcgggaactcctgtcattttgccattgacttccccgtccgtggaggcccttaatgtggataaggcaggagcgtttttgcctgcctgaataagtaactggccctttccgcatttgccgatcatgattccggattccgttcatttgctgacccgttcctctcagatgaccctgtacaaagatgaacagggccgtgtgcgccgcgcctattacggaccgaagctgcatcagccggaggatgccctggaaaacgccgcggatgctcctctcctgtattcctccctggcggattccgtaacagggcttcccaatgcgtccggcgagtactgcatttgcgtaacccaggcggacggggccctttccctgagcctggaatgcctggattgggaagtgctggaactggatgacgaccgggaagaagccgtcttctatgggaaggacccttcctaccctgtgcgggtggaaatccacgtgcgctcccacagggaatcggacacttttctgcaatgggcggtgattcggaacgaagggaaagaaggcatccgcctgcaccgcgcggcatccgcacagctgggtttgcgcgcagaacggtatttcgtcaccagcttccgcggcacctggggcggcgagtccctgatgagtgaggaagaagtggcccgggggcatgaacttgccctggtatccggaaccggcacccgcaccgcccaggagggaagccccggattcatcatctctctggacggtccggcgcgggaggattccggagaggtggttctgggggcgctggcatggtccggcaattaccggatatggtttcggcacagcccgtatcattacctttttgccggagcggggctggatatggctcccgcgccctatctgctggacggcggcggtgtgttcaagacgccgcccctcattctggcgcacagtaaaaacggcaagggagaggcctcccggcgcatccaccgctgggcgcgccgttacggcctgcgcggtggagaatcagagaggccgaccttgctgaattcctgggagggggtgtattttacctttacggaaaaagtgctgcacggcatgatgaaacgtgcggcagacttggggatagagcttttcgtgctggatgacggctggtttggcggccggttcccccgcaatgacgcccgtgccggattgggggactggcaagttaaccgcgctaaattgcctcatggactggaaggcctcattcgccaagcggaaaaactgggaatacgcttcggcatctgggtggagccggaaatggtgaaccctcattcggagctttatcagaaccatccggagtgggtcatcggtctcccgcatcgggaaaacaggctggaacgcagccagtatttgctggacctgagcaatcctcatgtatgcaggtacattcttgacgccatgcggaagctgcttggggggcatccgggtatttcctacgtcaaatgggattgcaaccgcaaaatttccgaccctggctctccctggctggatgcctgtcgccaggggaatctgcccattgactacgtgcggggctatgaacgtattcttgagacgctggcggcggaattcccggatgtgatattccaggcctgttcctccggaggaggccgcgccgactatggaaccatgtggaagcatcatgaattctggacgtccgacaacacggacgcttatgaacgcgtgttcatgcagtggggcataggccacctgttcccggctatttccatggccgcccatgtgacagcctcccccaaccaccagacgggccgctccgcttcgctcaaattccggtttgacgtggccatgtccggccggcttggttttgaactccagccatgtgacatgacggaggaggacatggttttttccaaacgggctctggcggaatacaagcgcatccgccccgtagtccagttcggtgacttgtaccggctttcctccccgtatgaaagccgggtggcctccctgatgtatgtatacgggaaacgggctgtcgttttcgcctggctgatggataaatggctggcggattcccctccgcccctgcgcctgaaaggcctgaatccttccgtcaggtacctggtgcgggaaatcaacatgaatgaagacggctctctcacggatgttcacgaacgaaggctgggaggcgactttctgatggacgtcggcattcgcatccgctggaaaaaggtcttccagtccgtcagcctggaggtgatggaaacaaaccctgatgctccggcttcatgataaaaagctgtagactttccgccagcagcctgatgttcttttttcatggtgggaaccggtgtttggcgcaggtttcatccccgctttgttaatattgtgagttatgcggccaacttgccattctgacgccgcttcttcataaggggtagatggcaggtgtaaacggtacgcccgtgacggaatgcatgatccctttccggcttttcagctgaaccggatattggggcagttgcgttaagggggcactaacatgaaggcggcaataaaagaattattgccgcctttattctttattgagttcctgtggatttgctggcagtcctagatgcccaccacgccgccgatggtctggatgatgaccttggcaatgatggtcatcaggataagggccacggggtaggcggtggcgtagctgaccacgggagcctgggagtccgttttgctggcgatggctcccagagccggggtggaggtcatgcctccgcagatgccgcccaggcattccagaatgttcatcttgaagaccttcatgcccacgaagtaaccggcaaacatgccggagcaggtgacgataacgcccatgatgaagacggccgcgccgtgggtggctaccgtatccaccaggtccgctccgcccttgatgccggcgtcagccaggaagaagaccagccccaggtcctgcaaaagaaggcgggtggggcgcgggatgtagccgacgatggggcccagccgtccgaagtggccgagcagcagggcgacgatgagggggcctcccgcaatacccagggagattcccgcgccgttgccgaggctgaagttgaccaggccaagaatgatgcccagggagaggccgaagcccagggaaagcaggtccgtctggttcatatcctggctgcggtggccgattttgtccccgtatttggtaaggttttccggggtccccaccacggtcagcacgtcgttgcgttccagcgtggtttcccccgtggggacgaaagtgaagcccaggcgggaaatgcgggagataatgataccgtccgtacgcagggttttcaggtcgcggagcttgtgcccggcatagtttttgtttgtcagaatcagtttgcggcgctccttctgggagtccatggggtagggattgtcacatacttcccccagaaaggcgatgtcgtggggcatggtgtcgctgttgcccacgatgaggacttccgttccttcccggaacgtgtcttccggagtcagaggcatcagcctgtcgttgcgaaccacgcgggtgaccatgcagtgcaggccgtccagcagcttgcagtccgcaatgttctggcctatcaggttgggctgtgtgacgcggacaaggcgggaaatgatgctgacctcctgtctggaatgcatggctttggcctctttgttgaggtcaaagtgcagcaggcgcggcagaagctggacgaaaaggaccacgcccaccacgccgaacggataggcgatgccgtaaccgatgctgacgccgcttccggaggctcccggcaggctttccgtggcggccgccagcgccggggtgctggtgcatgcgccggcaaagatgccggaagagattcccgcgggaactttgaaccagatgccgaagaggcaggtgaataaagctgacactcctacaatcaccgcagacatgatggccagtttgctgccctgcttggcgatggcggaaaagaagcggttgcccgcgctgaggcccacgcagtacacaaagagcgccagacccagctgccctacgccgtcgggaatggccaggcggtagtggccggcggccagagccacgaaaagaacgccggaaaggcccaggttcagtccgtatattttaatgctgccgagagcgatgccgaaaaagatgattccgaaaagaaccagggtactgtgatggagcaggatatcaaacataaaggcggttagcggttttgttccctcccttgacgaagggagggggaatgcccgtcaggatgagaatgcgtgcgttgaaaaagtagagggtgcggcgtatgccttccagccccgtcagtttctccgcaggtaatccagcagagtgacctggtccaggcaggacatatagggcatgtggtcgatgcccttgtccatgatgaacctggtcagcagtttgcgggcggtcgcaaggagaacggcgggatcccagggtttttccagatagttgtcaatgtgtgcgtcattgacggcctggatggtgtccgcgtgggtggcctggccggtcagcaggattttgcgtgtcccggcaaaacggtcgtctttggcgatgcctccaagcaattctactcctgaacctcccggcatgacgtggtcggaaataatcagtcccgtcagttctccgtcctggtcgaattcttccaatagctcgcggcattcggatgcggattccaccccttccaggcggaagcaggaattcagcggacgaaggtcgcgcaaaacgctgtccaggacttccggctggtcgtccacgcaaatgatgttaattttttccatgattgttgatggttggtatgactatcgtaaaaacagtatggcccggaatgctctccaggcggatgcggccgccgtagctgtccacaatgcgccggacgatggtgagccccagccccaggccgaaggaaagacctttctttttggtagtgaagttgggacggaaaattttttcatgcaggtcctttgggacgccggggccgttgtctgtgacggagaccagaatttcacgggtggtatgggatgtctggtccttgctgctgattttttccacccggcattctacgtggatggaagggttgggggtattttctattttcagagcgtcgcaggcgttctgaagcaggttgatccaaatttgaacgagctccgtcatatctgcgaagatgccgggcacggagtctctggggggcaggaccatttcaaaatcaacgccgcgcagactggacttgaccagagcaacagcttccgtaagggagtccgtcacgtttacgccttcttcccgtctggtgttgcctcctcccagcaggcgaacggaacggacaatggctgtagcatgcctgacagccagtttcatatcgtgcaggtcgtgtcccaattcccaataagggaggttttgttccagctggctgaggaatggcttgttcagcaactccggctgattctgtatgtccggaatcagggccagggccttggccacgtcctgggaaagcccgtaatttttttcaaactggcgcgccagcctgcgctgttcggaagtggatgcggaggaagctccttccaaccctttgttgtacagggtgtaacggaaggcgttttcctggcggaacatgttgtccagggtttccagaacaaagtctgttttacgggacaggactcccagggaattgttgagctcatgggctattccggcggataattgccccagggtggcggccatttcagaacggtggagcatccgcagcgcttcttccttttccgcagtgcggtcaaagacgcgggtattgcgcgccgccagttcatggacaatggcgggaacaaactgttccaggagcgtgccgtagtgttccacgtccacggcaggggtggcggtgtcgatataggccagttccaaatcagtttccgcaatgagatcggaggagctgcggaaccatccggaaaagaaactctgcactcccaaatagtctccgggaccggcccggaacgccttgtagattttgtgggaagtggaagctgtttccgggtcttctttaacgacgtggcggtaggaaaccacgctgccggataaaatcaggtaaagccttttgttctgttccccctggcggacgacgctgtttcccctgctgatggtaataatgcggtccggatcggagaagtacgccagattgatgcgttttagttttttctggaattcttcctgttcaatgatcatagggcgcttttcccgttgatgttggccatgccggggcaacatgtcccggcatggaacattaccttacttaaaaagcatggcattgggcaagaatcatcatcatgacgtaggttaaaatcatgcccaggatgcccaggatgacgccggaaatggccattcccttggagctgaccaggccggtggcataggccagggcgttggggggagtgctgatgggaaggctcatgcccagggaggaggcgaaggccacggataccagcagggcggtaacgccgcccaggggggccaggttgtcacccatgttgacgccgacaacggcaataatcggaatgagcagggaggccgtagccgtatggctcatgaaggtggccatgaacaggcagatgattcccgtacccaccatgagcgggaagggggaccattcggcaaagggaatggagccgatcaggttttttgccagtccggtgtcttgcagggccagccccagggcaaagccgccggctaccagccagagcacgtcccagcccattttcttcaagtcttccttggtgatggtttccgtaatggcaaagacggcaatgggaatcatggcgatggtattggagtccagcccgtgtactcccttgcccgttacccacagcaggacggtaacggcaaaggtgacgtaaacgataatggccttgggggttttcaggaatttccctcccacctgcagttccagtttcttttgggagatggggaacagccacagcaggagaagccatgcaatcagaatcatgacgatgacgaaaggaatgccgaacatgagccatttgccgaaggagacgtccagccccataccctgcagcgccttcagtgcgattgcgttggggggcgtgccgataggcgttccaatgccgccgaggttggcggcgatggggatggccagggcaaaggcggcgcggcctttgtcttccggagtgaacagggccagcaccggagtcaggatggcgagcatcatggcggccgtagctgtgttgctcataaacatggagaaaagagccgttacggacatcagccccagaagtacgaatttgggattggtgccgaagggttttaaaagtactttggccaggttcatgtccagcctgtatttggttgcggccgcagccaggaaaaagccgcccaggaaaagcatgatgatgggatccgcgaaggtggccatcgtggatttttgctgcatggtgttgacaaattgcagcccctggatgcgcgcggttatttccttgctgtacaggcgcccggccgcggtcttgagctgggcggctatggattcctgcccggcggcttcttccgtttttccttcacgggacagttcctgtgcgttcaagtctattttttcataagcgtccatgagctggaaccccagggtcatcctcacttcttccgcgtccagcttggttttcttatttaaccggttttcgacattttccttcaatttgccgactatctccggattgatccctttgcctatggcgtcatccagaatagaggataccgccgccttgtcatagcgctccggcatcaagaatgagagagagccgttggagacgcacagcagggacagggtaatgaccatcacggaggtggtccagatagggatgggttccaaaatccagaagagcgccgccatgacaaacatggcgatgacgcggatttcaatagggcttaattggattccccatgaagcgaaaggcaggaagaagacgactcctgcggcggccaggctgatagctgccttgagcagcttgttttgggtttcactcatgaataatagctggtaatatggttggcgggcggaagggtacttcccgattttacaaatagaaacttttatttaaaaaaattatgtcagaggggacggctgccgtttcccggagctggagccgggagctttctccgtgatgggaaaattgcgcaaccctatggggatatgtgtgtttagcagagataagtcaatcatccgttcgggagcgccgatttggccgagtgtttcctctgtattaaaaaaattctgaaggtagtaggttcctctatagccgcgcgacgtcaaatccccgctgatctggttgatttccttttccccgagaaggccggagtggattgtcgttcgaacctcaaacgggaaatttctgttgatcagataatccagcgtttgagtgaagcaggggaataagtccggacgcccggtaatggagccgaacagtttttccggcgctttgtaatccagggcaatataatcgcaaagcccttcctccaccagcgttttcaccacgccgggccgggtgccgttggtgtctattttgactgcgaagccaagctgccgtatattgcggcagatagggataaggtcgggacacagcgtgcactcgcctccggacagaaccaccccatccagaaatcccacccgatctctgagaaaatcaagatagtccgtccggtctccggcaggagaatccgttcccctgaccagggagacgttgtaacagtactgacaaaacaaattacagcctctcagccagaagatgcaggccaccttatttggaaaatccagcaaggtgagcggcgtgatgtctgctatgccccgacccgttcccatcgacttcgcatatgttgttgggagaattatcgcggctgttccgtttgggcggagcaggagcaggggcggcccggttccacgaagtggacgcggtcatggaactcgccctgtttgccggcgttgaaagtttctacagggcggtgatagcccatgacgcgcgtgtaaacggtgcagcgggtccggtcctgtgcgtatttgcttaatatttcctgtttggtcattgtcgtattaatggttgggtttgaagtcgggagcctattggaaaagggattttattcatgcctgtggatgtggagcagctcctcatcgcagaaggggcagtattcgtgctccccgcgcagatagccgtgcttctcgcaaacggaaaagagcggggtgacggtgaggtacggcatgcggaagcgggtcagcactttgcggacaatgtcccggcaggcttccggggagctgatggcttcgttcatgtacatgtggaagacggttcctcccgtgtagcagcattgaagttcatcctgaagctggagcgcccggaacaggtcgcttgtgtggtccacgggaagctgggagctgttcgtgtaataacgctgccccacggggccggcctggatgatgtcaggatagcgtttctggtcttcgcgggcgaagcggtgcgtggtgccttccgcgggcgtggcttccaggttgtacaggttgccggtttcctcctggtactcctgcatgcgcaagcggatgaattccaggatctcttcagcaaaggccctgccttcttcagaggtaatgtccatcgtatcgttggagaaattgcgcaacagctcgttcatgccgttgacgccgatggtggagaaatggttgcggaaggtgggcaggtagcgtttggtgtaggggtacaggccgcggtcatacatttcctgaacgaaggcccttttcttttccaggcaggatttggccaggtccagcagttctcccagcctggcgaacagggcctcccggttttgcttgaacaggtagcccagccgggccaggttgatggtcaccacgccgatggagccggtcatttccgcggagccgaagagaccgccgccgcgtttgagcagttcccgcaggtccagctggaggcggcagcacatggaacgcacggcatccggcttgtaggcccgttcgtcaggcacgcgttccccgtgttcattgacggtgtactggctgccgatgaagttctggaagtaagaggaaccgattttagcggcgttttcaaacaggagaggcacgttttccccttcccagtcaaagtcttccgtgatgttgacggtggggatggggaaggtaaagggctgtccggtgctgtccccttccgtgagaacttcgtagaaggccttgttgatcaggttcatttccttctggaaatgcttgtaggtcagttccgtcagcttgtttgccccgcgttccctcgccagggcgagcaggttcgcgtcttctattccttcaaagaggtgttcccctccgctgaagggggcctggtcccgcaggtcgcgcggcacagtccagtcgatcgtgacattggtaaagggagactgtccccagcgtgagggtacgttcaggttgtaaacgaaactgcggatgtctttcttgatgcgggggaagtccgtctggtccttgaaaacgtagggtgccaggaaggtgtcaaaggagctgaaggcctgggcgccggcccattcgctttgcagaatgcccagaaagttcgccatctggcccagggcttcccggaagtggcggggcggcctgctgttcacgcggctgcgcacgccgttgaatccttcattgagcaggttgcggaggctccatccggcgcagtatccggtcaggcaatccaggtcatggatgtggtaatccccttcccggtgcgcggctccttcccgtgcggagtaaacctggtccagccaatagttggcgattaccttgcccgccgtgttgttgatgagccccgcattggaatacgtggtattggagttggcggcaatgcgccagtcgctttgcccgatatattcctctaccgtctgcttgcagtccacgtaggtattgccggaataaaggccgccaagctgttcgcgctgcattttgtgcaggaaacggtaggtgatgaaggccttggccgtgtcaaaatatccggagcggaacagggcgcgttcaatcatgtcctgaatctcttccacatgcgcgctgtcctgatggctcagcttggcttccacctcttcatagatggaacggttgtaggcggtcccggaactgtggaaggcttttctaatggcctcttcaatcttatagccctggtattgttcctttttcccggaacgtttgatgatgcttgttgccatgatgggtgtctcgcttggaaagggtggtgaccgctcatccgcgagcctgggcaaaagcctggaaaaaccataggcaggggccgaccgcatgcgcgcattctcggaaaggggggcatgccgaagacctgtgcgtatgttcatcctgtccgcgggatgggaatacggcagcatcaggtcgtcttctggcttccggtgcgacatgtgatggggacttcccggctgcctgggcagccagtgtccggtccatcgtctaccggttacagcggcgcgtccgcgacggattttcaccgtcttccgttacctgcgctggaacgcaatgaaccacagaaagagacctcccgcaagaaaaatgtataaataatgtgttaaataattattcatatgctatatatggtatataacggtagaaaaatgattgataacacagccttcttttccgtcatggcaccatatatgcccttgcgcccctttcccggtctggaggagcgcgggaaaagaagaattcttgttgcaagaaaattccagccttcttttcccgtataatataacatgcgtttctttgccttttcaaaaaatggatggaagaaatactttctgttgccggtcctttccatgctttccgcaggaacttccgtttccggggcttccgcagactggaatgagaagaccatccgggacaatcttcagctggtggcggaatggcaggcgaagcatcccaaaaaacgttcgccgttgcattggacttacggtgccttttattccggcctggtgcaatatggcctgtccgttccggaagggccggggctgccgttgctgagaaaagcgggagaagagcaggggtggaagaccctgaaccggcattatcatgcggacgaccatgccgtggggcatgcctggatggagatggcgatggaagacggcaatcccgccgcagctgaaaagatccgcgccgtgctggacaaggtgatgaaccggccttcctccgcttccctccaattcctgactccgggctgccaggaccgctggagctggtcggacgccctgtttatgtcccctcccgtgttcgtgaaactggcggcctataccggagaccgccgttatctggagtttatggatagggaatacaagcttacctgcgactatctttttgaccgggaggagggtctgtttttccgggattcccgctattttaccgttccggcggcaaatgggaaaaagatgttctggagccggggcaacggctgggtgattgccggattgcctcttattttgcaggacatgcctgcggactggccttcccgccccttttatgaagacttgcttaaacgtctggcggcagccctgaaaaaatgccagtcgcccgacggttcctggcatgcgagcctgctggatccggacgaacctcccttgaaagagatgagcggcaccctctttatcatgtacgggatgctgtggggagtgaaccagggatatctggatgcggatgaataccttccctccatccgtaaggcctggaaagccgcctgtgatgcggtcagcaaggagggcgcgctgggatgggtacagcctattgcggacaagccgggccattattccgggaaagatacggaggtgtacggcgcaggggcctacctgatggccgggagtgagttgcgtaaatatgtcattggccgggatcatccgcagaagaagaccgtgaccgttacgaatcccctgggcaggttccgccctgctgagaccgtgtcggttccatggccgtccggaggttccggtgatgccgccggccttcgcgtttttgatgtccgtcacggatgtgttatcccgcatcagctggcggatacggatggtgacggaacaacggatacccttttgttccagagcaatttccggcccggaacggttcgtgatttctggattctggagaattcctgcctgggcgaagcgccttccgcggatgtctgtttcagccgtccggtaccggagcggctggatgatttcgcgtgggaaaatgatcttacggcgcaccggatttacggtccggccgtcgccaggccagcccctgagggagagggcctggtttccagtggggcggatgtatggagcaagcgcgcgggcgctcccgttatcaatgaattttacaaacggggggattaccaccgggatcacggttggggactggatatgtacaatgtaggtccggggcggggctgcggcggcattgccgtgttcagggatggaaaaccgcatgtgtccggaaactgggccagcgcccggacattgtacaatggcccggtccagactgcttttgaggtggtttatgcaccgtgggacattggcggcggcgtgcgtgtggcggagacgcgaagggtgacgctggatgcgggaaaccgtttctccaaagtccgcagcgtcttgaacgtccggggggctgaaacggtgaaggccggtgtgggaatggataccggaaagagcagaaatgattatgaagcggtcatggaggaccgggagtccggcggcctgatgaccgcatggagcaggccccggaaggatgacggatgcctgggaaccgccgtaatcgtgccctgggttccggaaggccgtgcggtggatacggaaggctgtacctacttgctcaggaaggtcgcaaacggagaaccctttgaatggtacatgggggcggtttgggacaaggcttctcccattcggtccgctgccggctgggaagcggaggcgcgccgtgtccgggagtgcatcggccatccactgcaagtccgggtgcggtaggagccgccgcatcctgttgtttctcgcggagcgcgtggaggcttcctcctgttacggctgcggcggtgcgggaatgggcagccattccgccagcgtttccggctggagggggaccggagtttcccgcgcgtccggagaagccagattcaggtcgttcctgacgatttccgaccggatggaagccagggaaagaagggtatggaagatgtggtcgtgggagacggctttcagccggttggctttcagggcgcgcaccatgtccggatagcgtgaggcgaaagcgtccgaataccagatgaacatggcaggccggtaaacaggcggcaggatatggccctggaacatttttccttcctctcccagcgctacgccgtggtcggagcagtaaaaataaatggcgggcctgttcttcaacagtgcaatcatgcggtgaatggaggcatccaggtcgacgatggaattgtcataggcattgacggtttcttccagacgggccttggggttgtccatattgcaggatgccggggtaaaacgttccgcctgcgcgggatagctgaacgccatatggctcccgttattgtaaatgatataaagctgcctgttgcggccgaagtttttcagggattcctccatgaccagggaagttcgttcctgcatcattccgggcgtctggtgctggagcggcgtctgtctccgttcacggcagttccgtgtcaggatgcccagggaataatcatgaatggaatctccgctcaggtccatgatacggacggtgcggaatccgtgtttgttgaacaggtcaatgaaggaggagtgaccgggagtgcggcggcacagttccgcatccgtaaacatgccgatggcggaaattctggtcacgatgccgaaggaagtggcgtgggggaaggaaacgacgttgggttctctggaaagccggggcattgtgttccgatggtaaccgttcaggggaagatggtccccccggacactctcccccatgtggaaaaccacggccaggtcgtctggggcttcgcactgggaaaggggctccgcgcaggacggaagattccgcaatgtgttgaaacgccccgcatcctgggtgatgtattcgtccgccagtttgcacgtcattgcaatatccacgagaggccagcctttggccttgtcagacgtgtagtaaagataaaggggttccgagctgtaggaggctgccggaatgctcagcagcagaagggccgcgtacaggccccaaatgcatgccagtgcgccccacgtggctttttggcgcagggaacggcggctccagtagatggccaggtagataaacccggccagaagcagggttcctgcaatggaagcgggggtgcagaaggcgcaggcttcctggaaattggtctccgccatgctggaaagcacggaaaggttcaggaccaatccgtaccgcatctgcatcatgtacaggcccgcattgaacagaatgatggcgggaagaaggacataggcggtgaagcggtatttcaggcagagaagaatggtgccgcagagcagggatgcggaggaggcgatgcccatgctgctcatcagcaggctttggccatcgttgagcacatagggattggccgccagcgccgccgcaagcccggctgcccacaggcagcgcatgcggcggggaatgaacgcggcgcgcagagcctggcagacagcagccgacaggctgtatgcggacggataccgttctgcggaaccggcggatgcatggggagggatcatcgcaaaggagggataaagaatgcttcctgcttaaagcgaagaaaaattataagagttttaaaatgaatcgcaagcagaatgttggagaagctttttccggtgtgggctgcctccgtaaaaagggaagggttttcttccatggactgctgcggcaaaaacagaaaaccgcccggaatattccgggcggttcctgggtgccgtggacggcctccggtgctcaaacggaatttatccgatgacgaggaatttttcagccttggtgccgcagagggggcacgcatccacgccttccagagatttgaacgtatctccgcaaaccaggcatatccagtattgcctgggcagggaactggtatctccgctttccagggccttcagggcgacggaataaaaatcggcatgttctttttccgcttccgtggcccacgtgaaggaacggacggcggctttctgcccttcttcttccgccacagcgatgaattccggatacatgctttcaaattcatgggtttccccggcaatggcggctttcaggttttccgcggtggttcctacatggatctggatatcgatgggctccattgttgctcccagcttttccagaaccttgttgtggttggcggcgtggacggattccgccttggaggcggcttcaaacaatttctgaataaggggctgcccttcctgggcggctttggcggcataggccgcgtaagtggcggaggcggtgctttcgcccgtaatggcagctttcaggttttctatggtcttagtcatcggaaataaatttataataattctaaaaagatgcaactgaaaaaatccttcaagggaggaaaaaacgcaaattcctctttctgcggcatcacggggatccgttacacaatgattcattgacgcgtgcatggcgagcctgtacaacggaaacgttatgaagagcattgtaacaattagttcggcatgtgccctggcatttgcaggtatggcttccgcccaggatgccccggctccggcacccgccgctgaaactcctgccgcgcccgttgcgccggccgctgaagtttccaaggaagcgaaggaagccgctgatcagatgctggcgttgatgaaggaaatgtccgccacgctcagcacggtgaaggacaaggccactgcagacgcggctgcggaaaagatggcaaaaatcaatgaaaagggggaagccctttccaagagcgcccagaaggttcaggctgaaatggatgccgccatgcaggcgcgccaggccgagcttctgcccattttcatgggcatgatgactgacatgcagcgtttgcagcaggccgacttttacggaagccaggccctgaaggacgccatgaagcagaccggcgctaccggtccggaagaagatgtggaagtggaggaagatgtggaggtagaagcagttccagcccccgctcccgcccagaaggaagcgtccgcccccgccgccaagtaactttctttttcaggattgtctctcctccggcattgcgagatgccggaggatttttttatggcagggccgtttgaaaaagcctccgggggggtgacgcaggaacctgcggtatgcctggctgaatgggagaggacggtgtccggagtttgccggaacatttgaaggaggctgaaaacaggcaggccgcctccgtttccggtgcggcctgccgggtagtgatgaatgaatggccagacctgttatttggcctttttcttcttggcagcggctttggcaggcttggctgccgtttttgcggccttggcgggtttttccgccgggcattcgttgacggagttccaggaccagtcccatttgtccacgttcatggcgcaggcggtcagaagcgctacggaagcgtccaggtcgtctttgtgagccatttcaataacctggtgcacattgcgggtgggaacggaaatggccccggcaatggaaccgcccggaacgaatttctgcatggctccggcatccgtgcctcccgccggcagcatttccgtctgccatttaattttgttggcgtctgccatggccttcatgaacttgaccatgcggcggtctgcaatgacggaaccgtcatacagcttgatggcggcgcctgcgcccaggtgggaaacctggtcgtgcgccggagttccgggaatgtcacaggcgatggtgacgtccagggcaatggagaaatccggttggatgtccagcgtgccggcctgcgcgcccctcaggcccacttcctcctgaacggtaaaggcggccacgaagttgcaggagggtttcttcctggaagccttaatggcgcggagggcttcaatcagcacatagcatccggcgcggttgtccagagatttgacgttcacgcaatcccccatttccaccaaatcccgttcacgggtaacggagtcgcctacggaaacgtatttttccacttcctccttgctcatgcccaggtcaatgaagaagtcggtcacttccggcagcttggtgcgttccgccggggacatgacgtggatgggtttcacgcccatgacgccgatgagatcttttttaccgtggacaatgacgcgctgggccgtcagcgtcttggcgtcaaagccgcccagtggcaggaatttgatgaaccccttgtcgtcgatgtgacggaccatgaacccgatttcatccatgtgggcggcggccatcatggttttttccgtgtttttgccttccacgatggcaatcacgctgcccatgttgtccacgcgcacggcgtccaccagcggggccacttcctggatgatgaaatcgcggattttgtcttcaaaccccggagcgcccggagtcacgcaaacctgacgaagcagttccaaattcataatgccgtcaatgtaatggttttcatgaaggttggctagcccataatgcggcctccggaaggaggtgccgcaggaacctgtctgccgtgcttaacggcgttcccgcgtaatgacggcctccggctgtgcgggggctccattgtccggtcttttgtaattgacgccgcgggcgtccaggaagggaagctggcggtcgaggcgtttacggaaatctttctcattttttagctcctgcggggtccaggcaacttccgccagcgccagggcgcgggggaagacatggtattcccatttcggcaggttcgggatatattccgtccagatgttcgcctggcagcccagcacctgcttttcccgttcccggggcgttccctgaggaaccggttccagtccgtaaacatgctgccaggtcagctgattgttgttaatcgtctcgtattcgggggcagcgggttttccgggcccctggtcatagtcaaagtacaggtggcttttgggcgtcatcacaatatcgttgccttgagccagagcttgtgcggcgatgtgcggcattttgctgcgccagaccatcatggtagcggtgggggaaaggcccccttcctggatttcatcccagccaatgagcctttttccgcggttattgatcattttttccacgcggcggatgaagtagctctggagctcgtgttcattggccaggccgttgtccttcatgacccgctgggccgtgggggactgtttccactgattcttgggcgcttcatcccctccgatgtggatgtaggggctgtccgggaacagggcgcatatttcatcaatgacgttttccagaaaacggaaggttttttccgtgggggagaaggtataggagtgcacgccccaggtttcctgcaccttgggcgcatagcccgggatgtccgtattccccagttccggataggcggcgatggctgcggaggcatggcccggcatttccacttccggaatgacggtaatgccccggtctctggcgtaccgcaccacatcccggatttcatccgcggtgtaatggccggagtaggggatgccgtctcccttattgcggttgccgatgacgggggattgagcccgggcgcctcccacggttgtcagcctggggtacttggcgattgggagacgccacccctggtcgtccgtcaggtgccagtgcagggtgttgaatttgtaccgttccatcaggtccagcacttttttgatgtcccgcacgggcatcatgtggcggcagctgtctaccatcaggccccgccatgaaaagcggggctggtcttttacgtccatccggggcagggccggagctccgtttttgtcggcagcgatgctttgaacgagggattgaagggcatacagggttccgttcacggaaccggaggcaatggagatggaatccggcgttacggcaaggcggtagccttccctgcccagggaagcgtcttccgtaaagatgatgtccgcgttgtttttaaccagggccgtgttgatcccgttgtcgcggaaaatccgttccgcctgcctggaaagaggatttttttccgggagcctgacgccgtttttcagggaaaacccgctttctccggtttggacgcgcatggcggcgggcaggggaatggtatggggcgcttcgagaaccggagcggatggggcgccccagcaaagggaaaacaggctgaaaaccgtggcggaaaaggtacacttggaaatcatagcgtacgtaaatacgcggcattttccgggaaaattccgtttcgaggttatttttgcaaatgcagagaaaaccggcacatgaaaatagcggttgttccgtccgggcgcctgtgagagtattcccgcgctatgaatggagccgcttccccccgcatcaggaagacgatggtatttgtgctgctggcgctttttctgggccagttcggaagcggtgtgtatgatctcgttttcagcaattttctgcgtgatgcccagcatcttgacgtggagatgcgtgggctgattgaattcccccgggaattgcccggcatcctgtctctttttgtggtcagcctgcttttcatgtttaatgaggtccgcgtggccggggtggcgtgcctgctgatgttcggcggcatgtacgcgctggctttctgcggcgccggaaccagcctgtggaccctgtccgcatggattttgacggtgagcctgggccagcatatcctgatgggcatgattgataccattgtcattcatacggcaaggccggaaaaccgcagcctgcggcttggccagatgaaggctctgggaacggctgccgcgctgctgggggcgctgtgcgtgtggatcaagtggaaattcaaccagtcttttgccgtggactttttcgtcacggggggcgtgtgcctgctggcgttcctgttcctgagccgggtgaagacgcccgtcttcccgcagcggcgcggctggaggcaatgtttcgtcttcaagcgcaggtatgccgtttattatgggttggaaattctgcacggcatccgcaagcagctttatctgacctttggtttctggctgatggtcagcacgctgggtcagcctcccggatatatcggaaaaaccctgctcatggccggtgtcatcggactggttactcaaccccttatcggctggagcatcaagcgctacggggaacggaaggtgacgattttcgacagcgtggcgctgtccctcctgtgtctggcatacgccttcgcgccggagctgctgcccctgcattgggccgtgggggtagtgaccgcctgctttgtcctggacaacctgctgttcgccctgggtatggcccggagcacctacgtggcccgcatctgcgagaagccggaagacattacgccaagcatttacaccgggctggccatcaatcatgtggcttctatcgcttacggagtgctgggcggcgtgatctggatgaatacgggcggcccgcaagcggtgttcctgataggcggcgtggctaccgccggggccgggctggtggcgcggcgcatggacaggccgcagccttgacagggtacctaacgcacgggtttgcccgcaccttttttaaaggcatccatgatcttgctgaagatagccgtattttcataaatgccggtgaaagcaccgcttcccgcgccgaaagcgtgcaccggaacagccacgccgtcatgactgccggaaccgaaccgggccgttatttcccccttttcccggctgccgcccgtgagcgcgaatgcccccgtattatggtccgccgtgatgacgaccagggtgccggggtgtttggaggcccagtcaagcacggctcccgcagtccggtcaaaatcaaggagttcttccatcatttcttccaggttgttgctgtgggctgccttgtcgatgttggacccttcaatcatcaggaaaaatccgtcgggattccgggaaagagtgtccagggctttcagtgcggcttggcggaaaacatctccccgcttggagggcgggggaagattccccggagcggtgacggccagcgtttttccgggaggcaaggcgccggcttcttcccaggtgcgggcgacgcggtatccctgcgcctgcatttcctggaagatatccctgccgtccggcctctgcgtgaagtatttgccgccgccgccaaagatgaaatcggcgcgggaacgggggtaatccccaatgatgccgtaggcatccgatcttttttcattattggcgcagaaagatgccggggtggcgtcattcagctcgcaggtggcgatgacgccggtggatttgcccatgtccgccgccttgtccaccagggaatccagcctgttgcccttggggcatacggcgactcgatggtaaagcgtcttggttcccgtcgccatggcggtgcccgcagcggcggagtccgtgaccagcttgtccgcgcaccatgttttggaaatacccgtaaccgggcagttttcaataaataagcgtcctctgttggctgcccatgcggcggaaaggtggtggatgcccatgccgtctccaatcatcaggattacgttggtgacgggaaggctgcggtcaggttccgggatttccgccaccggataggggcgttccagaatgaagcgctggttttccgccgccggaagcagggacggagcaagaaggagggcaaaggctaaaaggcgcagcggagaggtcatgcaatcactttcccgtctgcggcggaacaagtaaagaggaaaaaatatgccggtcccgtatggaaccggcatgaaccgttcaaaagggcttatttggcgtccgcctgtttttgcaggatgtcccggatctgttccaggaggacgacgtcatccggcttgggagcaggggcggccggagcttcttcgctcttgcgcctcagggctccgatcagcttgatggctacaaagacggagaaggcgatgatgaggaagtcaatggtcgcctgaagcaattccccgtattttaattccacatcgcccagcttcagcaccaggtatgccaggttgaccccggaagtaaggtagccgatgatgggggtgatgatgctggagacgaagacggagacgattttgttgaatgcgccgccgatgacgacggccaccgccaggtcaataacgttccctttaagggcgaatgccttgaattcttccagaaagcctttgaggttgaaaaaatgagccatagtggattcttgctggttgcggtggttattctgccgttaaaatgataaaagaaaagaaaaatgaatgggcggcggacaaagatgtgactgtcttccggggtaaaatgcggcaatcatgacgtggttcccaaaaaaatcatttacagacggggccagaagagcaaactacgcccatattaccttaacttatgaacacagaagaaaagctcaaccagtacgtactccattcctatggccgttatcccatggctgccgtccgcggagaaggctcccgactgtgggacagcacggggaagtgctatctggacttctgtgccggcattgcgacctgcgtgctcgggcactgccatcctgcggtgacgcaggccctgcaaaagcaggccgccaccctggtgcactgctccaacctgtaccagatcccccagcaggcggatctggcggaattcatcgtgaccaaatgcgtggagcgcccgggaaaagtctttttcgccaacagcggtgcggagtccaatgacggtttaatcaaagtagcgcgccgttacgggcaccacaagccccagccggacggcaagccccgttatgaggtgcttacgttcaacaaatccttccacgggaggacgctgggcagcatgtccgccacggggcaggataaaatcaaaatcggctttgaccccatgctgccgggattccgccatttgcctttcaacgatctggaaacggcccgcgaagccatcaggccggaaacggtggccttcatgctggaaaccgtccagggagaaggaggggtcaactgcgtgactccggaatttctgcggggcctggcgcagttgtgcagggagcacgatcttcttctgctgatggatgaagtgcagtgcggctttggccgctgcggcgacatcatgggatggcgcgccgtagctccggatgtggaaccggacggcatttcctgggccaaggctctgggcggcggtttccccatcggcggcttctggatttccgaccgcgccattgacggccagggtacggagctttcctccatcatggatcccggctcccatggctccacgtatggaggcaacccgctcggcactgcggtaggcctggccgtgctgcgggaagttgtttcccaggggctcccggagcgggcgcggcgcctgggcgcggaaattcgcagggaaatagaatcctggaacctgcctgttgttcagggtgtgcggggcctgggcctgttgctgggcattggcctgaacccggaaatggtggccgcgccggagggcaagacgatcgcctccgtagtggtggaggccctgcggcaggaagggttgctttccgttcccgccgggccggaaaccgtccgtctgctgccgccgctgaatgtcagtgaagaggaaatccagcaggctctggccatcatcaggcgcgtgcttaaaacgtacgccaaatagaatacagcccttatttgctttattgttatgaaggaagaagccattaaagcccccggcagcacgataaagcaatattccatcatgctccagaaccgggtgggggccctgaccgccctcctcggcctgctggacatgcacggcattttctgtctgggattcagcatgcaggactgccatgaggcgactattgcgcgcctgattgtcagcgatccggaaaggacgtcggaaatttttctggagaaaggtatttgctatacggagtccggggtgctggtggcggtgctccgccatggccccgcagacctcaaaaaatgcctggatgcgctgtatgccgcggaaatgaacgtcaactttctctatcccctgctgccttgcgtggggcgggggtctctggtggctcttcacgtggaggatctcaacttcgggcgcaccgtgctgaattccagcggcatcaaagtcctgttccagcaggacctcagccggtaggaacaaccgttttccccttcttccccactgccctgttcaggagcgttttctccaagcgcctcaaggggttgcccggttttttcgccttgacgggaggggaaaacatggtatggtacgggccgcatggcaaaagtacccgtaatcaatcttcgcaagggacacgcggtcaattacaacaatgacgtttgcgttgtagtcagcatggagcacaagtgccccccccgcatggcttcctatgtgcaaatgagcatccgcagcatttccactaaaaaggtgtataaccttcgcctgacttccaatgaatccctggaaggcgtcaacctcgcccgtgaggaatatgagttcagctacattgacggcatgggttatcacttcatgaatccggatacatacgaagacatcaccgtgtctccggaaatcgtggaacccgtcaaggattatctgatggaaggcaatatctacatcctgcttttcacggatgaaacggtcgtttccgtagaactccccgccgccatcaccatggaagtggcggaagctcctgaaggcgtcaagggcgacagcgcgaacaatgtttacaaatccgccacgatgactaccggactggtggtgcaggtgccccttttcatcaagcccggtgaaaagatttccgtaaagacggaagacggttcctatctgggccgcgtaaactgagttgcccctctttctgttctttgaagagccccgtccggtttgtccggatggggcttttttcatgccgcaatccctgccctttttcctgtttccggaagagggcggttacttttccgcgcggtatggaatggttcctttatggggggaatcctttttctggtaaatgcgaacgtagtctatttcgtatttctggggcagcggcagtttgtccagatctccgccggtggcgcccagagccaggttcaggatgatgaagtgaggctgccggaagggattggcgacttccttgtaagaggcgttgacggtattatccaggggagtccggttcagcagaatatcgtccgcatacaggcgcacttccttttcatcccagtccatacggaagacatggaagctgtccgcccagtccgcgtgtttttcctggagccatttgagcggcgtgtaagtggtgctccatttgcccacgtgttttttgggggagccccagcagagattggccagataggtggactggtagtactccatgatgtctatttccccgcacatgggccacttttccttgacgcccaaggtccagaaagcaggccacatgccttcccgcgggctgaatctggcccggatctcaaatcgcccgtacagccaggaaaatttgctgcgcgtcgtcagggaggcagaggtgtattccgcctctttccgtgtcgtctgccagttttttccctccggatcgtaatgggggttggcatgtttttccttcctgccttcaataatcagcatgccgtctttgcaataggcgttttccggctggtaccattgcgcttccttattgcggacgaaaccgtgttcgtaattccatttggcagggtccggacggccgtctttgtcgaattcgtcgcgccagacgagttcataatcggaataatccgctttttccacgactctctccgtttttttgacgccgtcaccatggagggtgtaaagctgggcgtggaggggggtggacaacaaggccgcgctggccaggatgttgaatagaggaggaatgttcatggaggaaagtaaaggtgtttgttactggtacggggccgcgggcgtttttttgtcattttttatcagagggggctgaagccgcgaaagcggcttgaggaacggaataaatgtgttaggttcgactaacagtatggggtcttgtctggacccggaacatcaaacattccgttttaatgacaatggaagaaaagaactatcttgtttccggtatgcattgcgccgggtgtgccgccaaggtggagcacgccgtggaaggattggagggggtggagcgcgtagagctgaatttgctgacggggaagatgaccgtcttgtttgaaaaacctgattcccccgccatggagcggatagctccggtggtggagaaagccggcttccgcctggcggactggaaggaggagccgcttgccggaacggagagggaggaaaggctggaacaggaggaaacgggcggctcccgtctcgtttggtccattctgctgctggttcctttgatgtatttgtccatgggccccatgtggaactggcccgtcccggaagggagttgggggctctggatgaattggtggacacaaggcattctggcgggcgccgtcctgtggctgaaccggcattatttgataaacggcgtgcggcagcttgtggcgctgtctcccaatatggattccctgatcgccatcggttccggctccgcttttctgtatgggctgtatttgctggtagcggggatgtggcagggtttcagtgtggaaggaatggagctgtattttgaatctgcggccatgatcgtcaccctgatttccctggggaaataccttgaacgccgctcttatcggaaaacgaatgccgccgtaaaagggctggtgaagctggttccccaggaggcgctggtatggcatgacggcgcggagcgcgccgttccgctggatgaaattcgttccggggacctggtggtggtgaaaaccgggcagcggattccggtggacggcatgattgaagaggggcaggcggctctggatgaatcggacctgacgggggaaagcatgccggtggacagggcggcgggggaccgggtgatcagcggaacattcaaccgggccgggtatctcaaaatccgcgcggaacgcgtgggcggggattccacgctggcccgcatgatccgcctggtggaacaggccagccagtccaaggcgcccattgcgcggctggcggaccgggtatgctatttctttgtccctgcggtcattgccgttgccctggtatcgctggttgggtggatggctgccggggaggggttttccttcgccctcgccagggcaattgcggtgctggtgatttcctgtccctgtgtcctggggctcgctacgcctatcgccattatggtggggacgggcaggggcgcgcggctgggcatcctgtgcaagtccgccggagccctggaagccctgagccgcgtggataccgtcgtttttgacaagacgggcaccctgacggaaggggagccgcgggtagtggccgtgctgccggaggaaggcatggatgcggacgcgctggtggaaatggcggcagctttggaacagggttcggaacatcctgtgggaaaggctgtttatgaacacgccaggcttctgaatttgcctgtccgcgccgtggcggatttatccgtggttcctggccgcggcattgccggaacggtggatggggtgccttatgcggtgggcaattccggattcatgcaggataagggaatttcctggaaggaggatgaaagccgcctgcgggagttcatgcggcagggcgcgtccccgctgtatgtgggcaggggcggatgccctgccggcgtcatcatggtggcggattccctgaaaccggacagccgtgcggcggtggacagtttgaagcggatgaacctgcgcgtcgtcatgctgacgggggacaacgccgccacggcgcggcacatggccggagaactccacattgacgaggtggtctccgacgtgcttccggatgaaaaggcctcccatgtgatgaagatggaggaacgcggggacaaggtggcgatggtaggggacggcgtgaacgacgccccggctctggcctgcgcccgggtgggcatttccatgaagtccggaacggagctggcgatggaatcctccgacatcgtgctgatgaagagcaaccccgcaggcgtggcggaagctgtccagctgggccgcaccacgctgctcatcatcaggcagaatcttttctgggctttcttttacaacatcatcggcattccgttggccgccgggtgtttatatcccgccttcggccttacgctgaatcccatgattgccgccggggcgatgagtttgagttccctgtgcgtcgtattcaattccctgaggctgcgggggttcaccccacgcctggggggcctggggaaatagggcggcctctcccccaccggcatttcccgttcaggagggctgcagcagggcctgggccagcgtgcgtgcgtggtctccgccgccgcccagcatgcggaccagttcatccacccgttcttcatggctcacctcccgcaggcaggagatggtgcggttgcccgcggatgctttctgaaccaggtaatgatgggaggccagggccgccacctgcgggaagtgcgtgatggagatcacctggtgcctgtttccgagctgctgcatcttgaatcccacagcccgcgccacttctccgcccacgttggcgtctatttcgtcaaataccagcaggggggtggcatccttgtgggccagggcgcttttaatcgccagcatgatgcgcgccagttccccgctggaggcaatcagacggagaggcttggagggttctccgggattggggccaaacaggaattccaccgtttccattccctgtgaacccggttcctgaaggggggagaggctcacttcaaagacggcctggcggaatcccagctcccgggagtgcctgacgatggaagccgccagcctgggcgcggagtcctggcgcgctctggtcagagcctgcccggcggcgtccatctgcttgcgcaggacggcgatggaggccctcagctcttccaggcgttccgtgcggtgttcaatgcggtccaggcggctggccgcctcctcccttcgggagcagacgtcctcaaaggaggggccgtatttcattttcagagattccagcaggttgatgcgttcctccagctggaaaagttcccgggggtcgcagtccagttcggcggaataatccgccaggcgtccctcaatttccttgagttccaaattcactcccgccaatggagccagccacgcggcggtggaggcgtccatgcgttccagctcatgggccgcccgtgtcaattccctcaattgggtccccaggccgggcacatccgtttcctccagcatggaaagcattttggagacctgttcccggagccgggtgccgttgcgggcgcgctgccagcgttcttccagcgtgagcacttcttccggagtgaaggcggcggaatctatttcatccacctggtggcgcagcagttctatttcccgtgcggtggccgcttccgcatgttccaggtcatcataggcccggcgcgcatcctgccattgcctccaggcgtccgaataggcgtgcaccaggggagcgtgctccccgaaggcgtccagcagggaaagctgcctttcctgggagaccagggagcggtggtcgctggggccgtgcatgtccaccaggcaggctcccgcttccctcagcagattcagggtgcacgggctgtcgttcaggaactggcggttggccgtggaagagatgaggcgcttgataatcaggttgccgtcttcgcagggcgggacgccatgctcgttcagaatggcgtgcacgggggaggattccggcagatggaacacagcttccacgctgcattgctgttccccagagcggatgagcgtcttgtccgcccgttctcccagcgccaggcgtatggctccaataatgacggatttccccgccccggtttcccccgtgatgcagatgaatccggaactgggttcccagagcagctggtctacaagggccaggtttttaattttcagcaatgtaagcattcgggctttggattttgaatgcattatggcatcatttgccctaaacgcaatcatgacctctgtgatgaacattctctttttgggcacaggaacgtccaccggagtgccgcagataggctgctcctgcgcggtctgcacgtccccggaccccagaaacaggcggttgcgttcttcaatttatgtggaggccgctggcacccgcctcctgctggattcttccccggatttgcggcagcaggccctgcgggaaaatatcacggatgtggatgccgttctttatacgcatgcccatgtggaccacgtgggaggttttgacgatttgcgcgccttctgctggcgccggtccggcggcctgcccatgtatgcttctcccatgacggtggacgccctgcggaccatgtacggctgggcgttcgttcctaaaccggggcggagcgggtacgtcaggccggagcctcacgaggtgacggctccgttccgtgtggggaacgtgctggcgacgccccttccggtgctccatgccggggtggagacatatgcctatctcctggaagcggaaggccggagcctggtttacatgccggatgtgaaaagcatcccggacccgtccctggagaggatgaaaggagtggatttgctgattattgacggactgcgttatcatctgcaccccacgcacatgtgcctggaggaaacgttggccgccattgccgccgtccggccccgccgcgccgtgctgacccacctgtcccatgatatggattacgggattctttccggcaagctgccggaaaacgtcatgcccgcgtatgacgggctgaggctgtccctgccgtaatgctcacgctgcatgttctcaggccatgactattccagacaattctgaccgtcccggcgcacggataccgtgcgaaaccagaaacgtattcggcttttccgtagccgtcagttccgtggaagagatgtccgctgcgctggcggaacgcgcgctggaggcggaagctccgtttctggtggccgcggcggatgcccatgtggtaaccctcggcgtgcatgaccgggattacgggaacgtgctggaacggatggacgtgatttgcccggacggtatgccggtagtgtggaggctgaaccggaggctttcttccggggaaagggaagcgtgccgtgtgagcgggccggatttgatggaagtgctggtgcgttcgaatgtgcagtatccgggcttgcgccattttttgctgggcggggatgagaagctgctggaagccctgtctggggcattaaaggaaaaataccccggttttcaactggccggggcgtattcccctccgttccgcccttggacggaggaagatctggaaaatatgcgggaggcggttgcttcaagcggggccaatgtggtatgggtggggctgggctgcccgaaacaggagcggtggatggcggagcagagggaattgctgccccccgcggtttatgtgggcgtaggggcggcgttcgctttccatgccggtacggtgaaacgggctccgcgatggatgcagaagaacggtctggaatggttgtaccgcatttaccgggagccgggaagactgctcaggcggtacgtgaagcacaacagcctgttcgtgtggtacgtgctgacgggcagatgagggcctttttccggtgtgcgtcccggagtagagccgcgggttattttatccttgtgccgttttcgtgcggccctatcatgattccgtttgaacctggacggaaatggtgggcgctcttccctccttcgtctttaaccttgtttttcttatgttctttcgccgtattccccggaaaagctggtatgaaaaaactgtggaacgcgttttcagggacaggaagctgtgcgtggaaaagctgctctccttcggtttcgttcgtgtggaaagcggttttctgcgcagggcggcattgctggacggccagttctgcatggaattggaaatacacgcggacggttctgttcatgcaacggtgcatgatgcggacgggaagaatatccggcatgctgacccgggaacggaggacaggttgcggacaagaatgctccgcagggaatatgaggaagaactgtggcatgtggcggaatgctgctttgaacctgatgttttccaggcggctcccgcccggagcctcatcgcgcacatccgtaaagcttacggggaggaactggaattcctgtggaggaagtttccggggaacgcagtagtgcggaggaaggatacggaaaaatggtacgccgcttttctggctgtgccgcgcttgaagctggggggcagttccaaggaacgggtggaggttttgaacctgcgggtttgtcccggagagtccggggttcttgcggataatcgcagccgttttccggcctaccatatgaataagaaaaactgggtgagcttctgtctggatggaaccgttccctttgaggaactggctgcgcgcctggaaaccagccggaggcttgccggaaagtgagcgccttcggcgcgggagtgtcgggagaaaccgtcttcccgcccccggatggacggccggaaaggggggcttgacccggaaagaggcggagcctacagtaagggcatgaatatagaagaaaaagctctgtccaccttccgcacggcgccctggcgccacaactgcgcccaggccgtctgcgcggccctgggcagggaggatttgctggaaaccgtttcctcctgcggtaccggaaaggctccagacggactgtgcggcgccctttacggggcgctgctgtgtacgccagtgcagtccagggaggagctgaggcggcggtttgtggaaaagctgggctattcccattgcagggagttgaaaaaagagggttccgtgccatgccgggattgcgttgcctctgcggcggttctggcttttaacctgagggagtgaacgcagaatgacactgccggattcatggtttttcatgaaaaaagagtctattggaatgaaaccagatagaataacatcatgaaaaaattgatctatatgatagcggcagcggccgttgcgattccggtggtggccctggcccagggagcctgcggtagcggctcctgctccaagggagacaaggacatggctgaagccaaagagcacatgaaagagggcgccaaggctgccaaggacgccgcctccgaaaaaatggaggaaggcaggcaggctgccagggatgcctatgaaaagggcaaggaaaccgccagggatgcttatcaggacagcagggacgccgttgaccatgcggcggacagggctgccgataaggccgaagccgtcggtgacgctgtgaaaaacggttaactcaaacgatgaacaataaaaatatttgcttattatgtgcgaatccaaggatcatatgaataagggctgcggatgtgcgaacgatgccgcttccggcaacatggaggaaggcaagcacaagatgaaagacgcctgcgaaagaggcaaggaagccgtcaaggacatggctgaaagcgtgagcgacaaggccaaatccatgatggacaaggataagaattcttagtcccggcggcggttgaagcaagccgtttcccattcttcctcccgtgcgcgggatgacctccccttgtccggatttccggacgaggggatttttatacgggccggttttccggggaaggggtgtcctgttccacggtctggagggcatgcaggctgattttatgccttttgcataattcctccacccggtcgcgttccagcaagatggttttgcccgcttccagggcgatttgcctgacgccgcattccgcgcacgtttcaatggtgacggggccgactgtcgggatgtcaaagcgcatgtcatgccccaggcgggccactttggccagcgtggccggtttgccgttgcccagttcccctccgcggcgtatgcagttgttggtgccttcaatcgcttccacggcgatgacggtgccgccgtgcacgatgacggactgcccgatgtggagacggctgatttccttggccgtctgcatgccgaagcgggcatcctcccattgttcaggcgtaggaggaggtccggcgatatgccccggctgcggcatgtgctcctccatgtaggtggaggccgggaggatggtgaagccttccttttccgcttccgtaatgacggccccaagcagggagtccgcatttttttccggcatgcgcatcaatacggaaagggcgcggaggtccggacggagggaaagaatgttcttcggattgatgccgccggccatgatgacgttccttacgccgtgctttttcaggaaagtgaacggcttgcttatctggcccacgctgaattcctggtaagcgtcgcacagggggatgacggcggggctggtttcccccttgaaccctacggccacgatacgcaattccggcgtccggcggcgtgcgccccggacaatatattccggataaacgccgtctccggctaccaggcctaatacgggcgggtctgttgtcatgcggcgtgaagctggggaacggggatggttacaggtattccgggcgctggagcaattccgccacgcgcttgagcaggcggccgatgtccgctccgtccaccacgcggtggtctcccgtagccacgatgttggccttggagatggggataaacgcctccacttcgtcactccagaccggggttttggtgacggcccccacccccaggataatggattcgctgggcatgggcatgggcgcggcaaaggtgaggccgaagccgccgaagttggtgaccgtggcgatgccgcccgtgctgtcttccggagccagcctgcggcggcgcgcctgggcaatcagcctgttatagtcttccagaagttcttccatcgtccgttcgttcacgcggcgcagcacgggaaccatgacgccgtccgccacctgggcggcgatgccgatgtcgattgttttgggagaaagaatgttttccctcaccaggtagccggcgcattccgggctttccgccagggccagggccagggcgcgggcaaagtacagggtgatgccgggccgcagcggggaattttgcctgtgcttgatgagggggtccatgaatacgggacgcccggcggaggccagcgggcgcgtccagctgcggcgcatggcgtccgccacggccagccgcatggatgaggccttgcggtgcggccattggctgacatattccaggaattcttccaggtcgtcaatggtgacgcgtccgcccgccccggaaccggagatgaaagcgatgtcggaggcgctcatgcccaattcatccatgcgcgccttcatccggggggacatgtagtgcgcgcccttcatgccggcgggtacggggaggccgcgcacgctgggctggactttcaggtccgttccgttttcctgataggattcccccgtcaccccgaagtggacgcctgcgggtttttcctcccggggaggggcggagggcgcggcctggggaacggattccggactggctggaagggacggctgggtggaatctccggctggagtcgctccggaacgctcaatttcctcttccgtggcctcaatcatggccatgcaggcgccgaccacgacggattccccttccttgatgaacacatcgctcaggatgccgccgcacatggtggtgacccccatggtggccttgttggtttctacctcaaagatttcctggtcggcttctacggtatcgccctgggccgccagcaggcgcagcacagtggcttccgcaatggaatccccgagctggggcatcagaatgggtactttaggcatgatggaaactgggttgaatcaaatggatagaagatggcggatggaggcggcaatggattccagcgtggggcggtgcgccttccagaggttggggtgctgggggatgggggtatcccgtgcgttgagcctctggggcggggcatccagcaggtggaagccttccgcgacaatgcgtgaaacaacttccgccgtgacgcctccccacggaaaatcttccccgacgaccaggacgcggccggtgcgcgctacggaggcgataacggtatccatgtccagcgggcgcaccgtccgaagatccacgacctccacttcgtagccgctttccttctcaagcaggtccgccgcacgcacggcttccggcaccatggcgctgtacgccaccacggtggcatgcttccccgtgcgggcgatccgggccgtgccgaacgggatgaccggggcttcccggtaattgtcctccgccttcagccagcggtacaggaacttgtgctccagaaaaatgacggggtccggaatttccacggcctggcgcagcatccagtaagcatccgctaccgtggccggagtcatgacgtgcaggcccggataatgggcgaacaaggcttccaggctctggctgtggaaagggccggtgccgggggttcccccgcagggcaggcgcaccgtgatgttggcgggaatgcccgtgcggtagtaatgggtggccgccatgttgacaatctggttgaaagcgatcgtgctgaagtcggcaaactggacttccataatgggcttcttgcccatgacggcggccccggtcaccatgccggccatggcgtcctcactgatgggggcgtcaatcacccggtccgggaacagctccttgaggcccttggtcgctttgaatgcgccgccgaaaacgcctatgtcctgcccgtacagaaagacgtccctgtcttccgtaagcaggtctttctgggcgtcgtggatggcatcaatgtatgttacgctcatgggaatattccgtttgctggcttaataaggtctccataccgtagcgttccagtcttcccggaaggggtccggttccggttcccgctgcgcggtggctacggccagctggacttcatcggcatactgttttttcaaagccgccgtttcttccggcgtgagccagccggcttccagcagctgccgttccgcgactgccacggggtcttttttttcatattcctctttcagctccctggggatgtaggaggcgtcgtcatgttccccgtgcccgcacatgcggagggtcttggcaagcacccactgggggccccggccttccctcgcgttattgacggcggtccggaaggtttccagcgtggccatgaagtccgtgccgtccgtttcatgcacggtgaatccgtagccgcggcccctgtccgccagggaggcttctccgaattccctgatattgggggtagagtaggcaaattgattattggttaccacgagcaccagaggcagccgctccacgttcgccatattggcggcttcgtgaaaagctcccgtggacgtggtgccgtcgccgcagaaagctactcccacggggccgggcagtttgccgtccaggcgcttggcgaaaaggcagccgatgacgaaagccaccgtgctgcccagatggctgatgggagccatatagccttccgctggcaggccccggtggacattgccgtcccgccctttcatatatcccagggcggaacccaggtaggcgcgtgccgcttcaataatcggttccccccaggtgacgcgtgccgcctgttcccggatgaacggggcgattacatcgtagccggcagtcagaaagacgcctccgcatgcggcaatcgcttcatgtccgcggcccaggtaaacgccccccgtaattttgcccgctttgtaaaggctggaaattttggtgtcaaaagcccgcgccagcaacatggccttgaaagccctgacggcattttcctttaagtccggttgtgtagtgtcgcaatgtgccaccccattattttatatgctgcataaggaaatgcaatgccatttcatgaaactgcctgagactttgtgtccgcaggcgcggggccgctccgcagggcggcggaggttcgcggggggcggttcccggctggcgggagcgcttttgcatcttccgctcccgccggcggatgcgcggaaatttccggattcatttcccacccggcggcaggctgcatctcagttcgaatttgggatttgccacatcgtaatctccgggaaacaattccgtctccataatgattttatcatattcctgcgcaaaaaggtccggaaaaacgccgggcgcctccgcaatgccgctttcctgcctgatgacgcagagaaaggaggcggcgggcaggcgcatgatttccttcatccgccgggcgtctctgccggccgcttccacctccacatacaggaactgctccgtccctgctttccggtggaaggaaagcaggccggcttccgcgcccagccgcagctggcagcggttaatatcgtcaaagatgcgggtgataagaatgttaaattccggagtatgctgttttcccgcatagggcgccacccagcagtatttttccggcaatgcgtggatggcctgttccccatgaagcagaagatcttcttcccggcccatctgtttccggaatttttccagcaggcgcagcttttcctgaatatccctgattttccggtgtgccagcatggtgccgtgggagaaaagtttcttataatggatccttcgctggtccctggtcaggaagccggtaaattccttcaggggaatatccaggaaaatgcaggcgcggatggcatccaccacgggaatctgggaaagagtgtagtaacggtagccggtgtccgggtccgtataggccgggagcaaaatgcccagttgttcataataccggagggatttgacatgtacgccggtctgtttggacagattgccgatggttagtaaattctgtttgtccatcctgtattgcggttggtgggagggaattgattgtttccgccggaagagctccggcggaaacgggagctgcgcgcagaagaaacctttctgaagacgaagttattttcaccattcattggatttttattgtcaacaatttacaataaatgacaaagaccttccccacttaatttttccattgcctcttgactctcccattatgggatactttacatcatatggcaattgaaaaatccccggtcttgccggaagtgcggttccgggatttcttgaggttccaaacagcatgattcctgatgaaaataattaatcttttattctgcatgcccctgctggtggtttgcttctcctgccagcgggagggtgaaagccaggcagccggattgcccggcgaaaccgtgccggaagtgtctgtcatgacggtacgcagtactcaggttcccgtaaccgccaatcttcccggccgtatggaagcgtatctccaggcggaagtgcgcgcccgcgtgacgggaattattcaggaacgctgctatcaggaagggcagacggtccggccgggcgatcttctttttaaaatagacccggctccgcttcaggctgtcctggatgaatgcaaggctgcagtggctcgtgccagggccgttctgtcggatgcggaggacaaggccgcccggtattcctccctggtcgccaagggcgccgtcagcatacgtgagcataagcaggccagggcggaggaagagcgggccagggcggaatatgccgccgcggccgcctctctggagcaggcgcgcctgaatctggaatatacccgggtggaggcgcccatctccggccgcgtgcgccgtgccctggtgacggaaggggcgtttgccaaccagaatgaattcacccacctgaccaccattgaacagattgaccccatttatgtccgcttcagccagccggcctcccagtacagcagcctgcgccgcgccgtcgtatccggattgtggaagggtgtgccgctgggcgaaatcaaggtgcgcctgctgctctccaatggggaggaatacccccattccggcaggatcattttttccgacatggcggtggacccgaatacggatactattgaaatgcgggccctgttccccaacccggaccatgaactgctgcccggcgcctatgtgcgcgtggtatttgacagggcggtgcgggacaacgtcttcgccattccccgggatgccgtcatccgcaccgcgcagggcgcttccgtctttgtcgtgggccctgaaggtgtgctggaagcgcgccccgtcagggcggatacgctgaacggccgggaatggctggtttcagaaggcctccgggatggggacagggttgccgtcagccacacgatgtccctccgccccggcatgaaagtccgcagcgccgccgcccggccgcaaccccatgcccagcaataaaccgctatgcctgatttcttcatacgccgccccatttttgcctgggtagtcgcactcctgatttccctgatgggccttctggccattcccagcctgcccattgctcagtatccggacatcgctcccccggtcatcaccctgcgcaccacatatccgggggcttccgcccaggatacggaggaagccgtgaccgccgttattgaaaaggaaatcaacggcgcgcccggcctgatgtacatgtccgccaccagcagctccgacggaaccgtggaaatagccgctacgttcacgcagggcacggatccggatattgccgccgtagaagtgcagaacaggctgaaaatcgtggaatcccgcctgccggaatccgtccggagagaaggcgtgttcgtggaaaaatcatccaacaatattcaggcgatgatctctctctcttctacaggcagcctgaatgatacggagctgggggaatgggcttccgcccgcatcatcccggaactgaagcgtgtgaaaggcgtcgggcgtgtggagcttttcggtgcggagacatccatgcgcatctggccggacccggaaaaactggaggcgctgggcctgacccccacggatattgtcaatgccgtggctgcccagagcgagcgcatcatcatcggggacatcgggggggcgtccgttcccgaatccgcccccatcaacgccggcgtggtagcggaggacgctttccgtacgccggaggaattcgcctccattgcgttgaggacgctttcagacggttcctccgtcaaactgggggacgtggcgagggtggagctgggcgccaacagctacgcgttcttttcccgctgcaacggccagacggccaccggaatggccatcaagatggctcccggctccaatgccgtggaaaccatgggcctgctcaaggccaaaatggatgaactgtccagggatttcccgcccggagtctcctaccagattccctatgaaaccacccacttcgtggaaatctccatccggaaagtcatttcaaccctgctggaagccgtcctgctggtgttcctggtcatgttcctgttcctccagaacttccgggccaccctgattcccacgctcgtcgttcccgtagccctgctgggaacctttgccgtgatgtggctctccgggttctccatcaacatgcttaccatgttcggcatggtgctcagcatcggcattctggtggatgacgccatcgtggtggtggaaaatgtggaacgcatcatgatggaggaaggcctggatgcccagcgcgccacggtgaaagccatgaagcagatcggtggggccatcgtgggcatcaccgccgtgctcgtggtggttttcgtgcccatggcctttttcagcggagcggtggggaacatttaccggcagtttgccgtaacgctcattgtgtccatatccttctccgcgtttctggccctttccctgactccggcgctgtgcgccgccatgctgaaaccctcctccgtggagcaccaggagaaaaaagggtttttcggatggttcaaccggacgatacaccggtccacggaccggtacggccgtgccgtatccggaatgatccgccgccctgtgcgctccctgttcctgtatgccctcattattgcaggggccggctatttgtaccttacgctgcccacctccttccttccggaagaagaccagggcaacttcatggcgatggtgtccctccctgccggcacccttcagaaggaaaccagcgtgcggctgcgggaagtggaggattacctgatgcggcatgagccggtggagcacgtttactccgtgggagggttcagcttcatgggttccggaaccaacatggccatgctgtttgtcggtctgaaaaactgggacgagcgtcccggagaaaacagttctgtccaggcgattattgaccgtgtcaatgcccgctttgccggagacggccagatgatggtcatggccctgaacatgccggccctgccggagctgggcaattcgtccggattcgacttccggctccaggacaagggcggcctgggatatgcccgcatggcggaagcccgggacgagctcctggcccgtgccaacgcgaaccccaatctggcgggcgtttatttctccggccaggcggatacgccgcgtctgcacgtctccattgaccgggaaaaagccttttccatgggagttcccattgcggagatcagcaattctctggcggtcatgttcgggtccagctacgtgggggatttcatgcatgacagccaggtgcgccgcatcatggtgcaggcggacggaaaaagccgcctgaacggaaacgacattgaggacctgcatgtccgcaatgaccaggggaagcttctgcccctttcctcctttgtcaggctggactggacggcggggcctccgcagctcacgcgctacaataactatccctccttcaccatcaacggctcttccgcgcccggcaagagcagcggagacgccatgaacgccctggaacagattaccgcctccctgccgcagggcgtggggtttgaatggacggggcaatcctatgaagaaaagctggccgggtcccaggccacgctgcttttcggcctttccatcctgattgtctttctggtgctggcggccctgtatgaaagctggtccattccgttggccgttattctggtcgtgcccctgggactgcttggagccctgctggccgtcttcctgcgcgacatgcccaatgacatttacttcaaagtgggcctgattacgaccatcggcctttccgccaagaatgccattctgattgtggaagtggccagggaattttaccgggagggcatgaatgcggcggaagctgccgtcgccgccgccaaactgcgcctgcggcccatcctgatgacctccctggcgttcggggcgggcgtcattcctctggcgttcgcccatggggcggcggccggagcgcagcgcgccgtgggcaccggcgtgctgggcggcatcattacggccacgctgctggccatcttcctggtgcccctcttcttccgcctgacggccggaaagagggggccggatcatccggaaggaatctgaggcaggattcccgctgcggaaaatttttcgtgaacgccgccggaactcctgccgtcctgctgcggcaggagttccctgcatgccgcgcaagagaactattgcgcagacgcatttcgaatccgctgtcaatcctattattttagtaggaaatatattttttcaatgccgccatggaaacctcatggtttgcatgaatgaaaatatattgatgataaaatagttgtatctctttctcatggttctccggataccggctgccgctgttctccggggggatgacgcgcgcctgccgtttccggcaggatctattttggaataagcgggatattttctaaagctttctctgtcaacgcgccatttgaacagcggattcgaaatccgttacttagcggccttcccaatattaacaattcttattaaaagatatgagacttactcttccatggccgttgcgccgttttttgctgggggcgcttctgtgttccgtaacgatggcgagcgccgcttccggggcggagttcgtggtggacgcctcccaggcaaccgacccgtccgggaacgtgtaccgcacgcttcaggaattgtcctcttccggggcgctgtcttccggggataccgttatcctgtgcaatgatgattcttccctgacctcagccctgaatgcggctgtccatttccgttccaatgatccggaggtgtcccgcaccatcagcggctccccaaattatttgtacaactttcaaggaatgcccctccggcccggcagccagacacgtcccgatatatcgggagttcttgatgaaaatggagttgccgttttgacgatggattccatcattctggatggaatggcgttaacaacgacgaatacttcttcctgtataaaaataacgggcaacgtccagtttgagaattccctaggagttgctgccatcacctccggaaaatacagcccggacggagccgtctcgatgacgttggaaggccgctttgttttcttaaataacggtcatgctctccgtattttagaaaaatcaaacgtggtgataggagacaacgccctgttccggagaaattatcacggctgtattgatatgcctacgaattatgacggaggtgcgatttggagtagggggggaaatatcatcataggaaatcatgcggaattcgacgggaattatgttttctctgatacgcaggcctgccggggtggagtattttatgatgacctttttgccggtgcgataactgtaggagcggatgccgtttttaccagtaactttgttttcagtaccaactacgctgctgctgggggcgcaatgtttgtcagaaaggatagactgaaatatgcggcagaaacagaggcaataaccatagggcccaaccccagtttcatcaaaaattttgcttactccggaagggctgatgcttatggcggtgtgatttacagtgatggggacatttctttcagcgatggaggcatgttcatcggcaactatgccaagacctgcgggggagccattacgatgggtgggaaatgcgacctgctcgctctgacgaaggacgcgcttttcagcggcaacatgactggaggagtcttcacccgccatgaggacggcaccttctccgtggaaaacggcgtggccaatgccattgacatgaacggttctttgttttcttcactttatacgcccaatctgacgcttgccgcggaagagaggcgtgaaatccgcttcaacgacccgattaccagccggaacgaagaccccggccgccctatgaccctcacgctcaaccgctacacggacggggaggggaatgtccgcgacacggaaggaacgatcgtcttcagcggcgaaccctaccagggggaagaggcgcatctcgtcgccagccggtacagcaacttcctcgcgaatactaccctctatggcggcgccctcctgctggaacacgacgttaccttcggccggaatcctgaggaaataacggacaactcctccctgacggtggaaaaaggcgtgctggaaatcaccggaggaagcaaggccaacgcctccagcttcaccctctccggccctggcgccgtcctgcgccccggggagagcgccttcatcaacacccacaacgccgacctttcccacggcttcaccttcgatatgcgtcaccagctccaggccgggccggtcttcggcccgggcctgatgctctccgccctggactcctttacggccggggggtacatcggcgtggcggacacgggagccaacgccccctggttctacgcggaccgctcctggaagcaggaccgcgtcttccacgtgctgacggatgtgcagcacatccatgagggagactttgacggggccgtctcccaggccactggaacggcccgggtggatgacccctacgcctacacgggaacctggagccaccggtggacggacgcggacggcgacggctacgccgaacagctccagctggtctggaaagcggacggaacccccatcagccgcgttgacccggaactggccgggggactggccgtcaactccctctggagctcggcgtccaacgcggcggccctgggcggcaacgtcctctcccgtctgagcgtgccgcgcctgaccgacaggcatgcccgcaacctgtggggcatggggctgggcgacttcgcccggcagcgcagccggggaggcgtggacggctacgactacaacggaggcggctactccgtgggggcggacagcggcatgggaggggaggacgagggcatctgggggatcgccttcgggcagctctacggccatgccagaagccgggacttccaggggcgcaacacgcaggatacccggatgggctccctgtactggggccgcctgatggaagaaagcaacagggcgtactggatcttcaagggaagcctcacgtgggcggaaacgcgcaacaacatgaccagccgcctgagcggggcgccggcctccacgggcaaatggaacaacgagacgtggctggcgcaggcggaagtgtcccggacggcggactgtgcgggagggtggaggctgacgccgttcgtgaggatggaattcacgcacggccggcaggacgccttccgggaacagggagggtatggccgtgacttcggaggggcggcgctgaaacgcctgtccattcccgtgggcctggaaataggcaggacggacgaatggaaggggaggccgtgggcgcagtcgctgcgcgtgtcctatgtgggggacgtgctgagggacgtaccggaagcgacggtgtatagcctgtacagcgacatgggctggagaggaagggcggtgagcccggaacggcacggcctgcgcgcggagtacaacacgtccctgcagtgcaatgagcgctggagcgtgtacgggggctacgggctggaagtgaggggaagctcctgctaccaccgcgtgaacgcaggggtgtcccggagtttctaaaagaaagcttcaggaaacggaatgaaaaataatgatatgattattctatgaatctgcgtagaaaactggcatttgccgtcatggccctggccattccttcatcatgggcggatatcccggaatcctccgtatcctctgcggccgtctttgccattaaaaaagcctggcccagggccggcttcattgaatgggaactcagcggatcaggaaaactttatgaagctgaattcaacatcaacggttttgaatttgacgtcaaagttgaccctgaaggaaagatactcctagtcaaggaggaaatagcggtatcggcccttccggggccggtccgcgcggccgttctgaaaccttacccgggcggcagaatcaaagaagcggaaaaagtgacggaaggaggcgtcatccgttacaaggtggaagtggtggatcatctggatgattacgatgtcctgctgactccggagggcgatattctttacgtggaccattaaacggcttgaaccgtctacagccggaaacgggcgccgccctgtcaggtaaaaaccctggcagggcggcgttcttccttttcggaatatccagtcgtcccgcggggctggatgatgcctgttttttcattgccccccggcgcggcgcatgcgctcaagcggaggtgagggccaggcggcccggacagttccggattgagcgtcccggggatgtttcctcctccgtacggcgcgggattattccctgccgcgggcgttcaggaaaatgaacacgtaatacagcagcatggccagggaggaaagcgctcctaccacgtaagtcatggcggcccagaacagggcgctcttggcctttccatggtcgaaatagttcatcaggtgggagcggtccagccatttcagggccctggcggaggcgtcaaattccacgggaagcgtgatgaacgcgaaggctgtggtcacggcaaacaggccgatgcccagccccagcacccacggagagccgcccatggccagcagcacaatgccgatcatcagcacaatgcccaccaggttggaggagagctggacgatgggaaccagcgcggaccgcaagcccagccagtggtaagcctgggcgtgctgcacggcatgccctacttcatgggcggcgacggcagcggcggcaatgctgttggaattgtaaacggactcgctcaggttgacggttttgtccgccggattgtaatggtccgtcagatggccgggcgtggaaatcaccttcacgtccgtaatatggttgtccttcagcatctgctccgccacctgcctccctgttacgggaatggaaatctgggagtattcgctgaagcggctcttcatgcgcgcactgaccagccagctcagaagcatggagcccagcagaatcaaccagtaaatggtataggaatgcgttggggcggtttccgccgtctgtaccgtataagaaaggagatcgatattgaataactcaatcattgcaaatttgaccttatatcatcaggctttgttgaatccagagggcaccgtgtcagcctccggagggagtcccccggcttctgtcatacggaaatgtgcggaaaaacggagaattcaatcatccgttttttgggagaggagcttgccgtccggcgaataataaagctccactttgcgcacggcgggggattcggaccggcagtccacccggtacttcaggactccccgggcggtaatctgcctggcgcggcggagggcataccccgggaaatcgcgggcgatggccgccgtaacgggggctggaagatgctggagggaaatatccgccttaaccaggctgacagtgccgtcgggatacaatttcacctcgtattccagtccattgaggtggaattcggcttcatagacatcttcgtcattgtcgaaatcccattcaatggcgcctgcgttcggatactgcttctgtacctgctctttcacgggggcgggaacgcgggaggccgggatatccgccagggcgggcaaagtgaatgccgcggcaagagtcgctgtaagggtgcgtgaaatattcataaatacggaataattgtatttattaaaaaaacaagaatcttttgcggatgttttgtgacaatttagccatcaatgaaatgaatccgggcatggcggggtttcttgtcgccaaaaagcggatggtggagttgaatggcggcatgcaacagggtattgtctatttgcttggagcgggtcccggcgaccccggcctgataaccgtccgcgggcgggaactggtgggaatggcggaagtgctggtatatgatgcgctgagttcggcggaaatgctgaactgggctcctgctgcatgcgaaaggatttttgtgggcaagcgggcttcccgccacgccctgccgcaggaggaaatcaacgccctgctggtcaggctgggccgtgccgggaaaaaagtggtgcgcctgaaagggggcgacccctacgtcttcgggcgcgggggggaggaggcggacgccctgcatgaagcgggcatcccttttgaagttgttccgggcgttacttccgccattgcggggcctgcctacgcaggcattcccgtgacgcaccgcgggtactgcacgcagtttaccgtatttacgggccatgaaggcgagaacaagaaggcgtcttccctggatttgaggggaatagccgaggcgcagggcacgaaagtcatgctgatgggaatgcggaaactggcggatgtatgcgaagccctgatcgggtacgggcaggaaccgtctgtgcctgccgccgccgtccagtgggccaccacgggcattcagcgcacggttacgggaactgtgaaaacactgcccgccagggtgcagaaggccgggttgggcgctcccgcagtagttgtcatcggggatgtggtgaaagaacgcgagtccctgaactggtttgaaaaactgcccctgttcggcaagcgcatcgtggtgacgcgcacccgtgcccaggccggggaattgagcgcgcgcctgcgccgcctgggggcggaagtgctggagatgcctgtcatacgcattgccccgccctccaacaggagggaatttgcggaaagcgtggtgcatgcccacacatatgactggctggtgttttccagccccaacggggtggaacgcttcttccaggcgttttttgccgtgtacagggacatccggagcattggaggagccaggattgcggccatcgggccagggacggaggcgaagctccgggaatacgggctggccgtggatgtcatgcctaaaaagtttgtggcggagggcctcgttaaagcgttcagggacgcacgcgaagaaataggaaccattgaacacagcacattcctgtgggtgcgcggagaagaagcgcgccgcgtgatttacgacgggttgaatgcgctgggcgccattgtggacgaatgcatcgcctacaaaacggaagcggaaacggaggatgtggcgggagtccaggcggctttccgcgaatgcggagcggacgtcgtgacgttcaccagttcctccacggcggagaactttttcaagctggggcttccgtggccggagggatgcagggccgccagcatcggcccggtaaccacggcaaccctcaaggagctggggcatgccccttcaattacagcgaaaacacacgatatcaacggtctggtggaagccatcgtcaaggccgccggcaaatagggaaaacggcgcggacggcgtgaaacgccgggccgggcagatgggaaatacaaggcggggaacgccgtttaaaagccattgacggcttcccagccgatgaccttcccgtcttcaaacaggacattgcaggagacgggcgggcggctgcccaggggcatcgtgacgcctatcccggtgcctatgccggaatccctgccccggaatcctcctccgcccaggcccagggaccagcccgtgccgctccgcgtgtaaatccaccgttccgtattcttcccgttcatcctgcccgccattttctgttcgggtttcccccatgccagcagaaccgccatgggagacattcctttttccagctccccgcgcgccactttggcctgatgctccttcgggagctgttcataagccggcatattctccgcaatgcggtcggacggtgcaggggagcaggctgccagcagcacgaggcaggaaggaagaagaacgaaagaaaaaccggttttcatcatcccgtaaatagcacggcggcggatggcaggcaaggtggcagagcggcttttcggaaaaatggagatgagggaatccgttattttgacataaaagcgcgcttttcccgtaaatacataattggttattgacaagcatggggggtaggggagtaggaattcagctccaaatgcaacgccccctttcccgtgcgggcagcgtcgcttttattgttcagcacttttttccgagccgccgatatgtccaaaacgttaattatagcagaaaagccgagcgtcgccactgatttggcgagagtgctcggcaaagagcttggaaaattcacccgggacaagtccggggcattttaccagaatgaccgggccatcatcacctctgccgtaggtcatctgctggaacagaaaaaacccatgacggaagaaggaaagtccctgccgtggaaattcgactatctgcccgtcatccccaggaagtttgaactggaacctatcaagcagtcggaagaccgtttgaaaaaggttcttcagcttgccaggagcaaggacgtcacggaaatcgtcaacgcatgcgatgccgggcgtgaaggggaactgatctttcacaatctggtgcgttacggaaaatggaccaagcctacgcggcgcttatggatgcagtccatgacggatgaggccatcctcaacgcatggcatggcatgcgcagcgaagctgacatgaagcccctgacgaatgccgccgtgtgccgttccgaatcagactggctggtggggctgaacagcacccgcgccctgactatcctgcaatcccgcggcggcttcaacgtcacccccgccgggcgcgtgcagacgcccacgctggctattctgacgcagagggaattggaaatccaggcgtttgaaccggagccctattcggaagtatgggccgaattcgacgttcagtccggctcttactccggccgctggattgaccgtgactggaagaaaaacgatcatccccactcccgcgcagagcgcatctgggatccggaacaggcggccgtcatccgcgaccgctgccgcggcaaagccggcacggtgacggaagaaaagaaaccggtcacgacggtcgccccgctgttgtatgacctgacttcccttcagcgggaagccgccaaccgctacggtttttccgccaagcgcacgctgcagctggcccaggaatgctatgaaaagcacaaggtgctcacttatccgcgtacggactcccgctacctgccggaagattatctgggcaaggtttacggcatcgtaggcacggtggcggagcagaacccggaattcgccccctttgccagggacattctggacaacaagcgcatcaagcccaaccggcgcgtgtttgatacaaaaaaggtgagcgaccactttgccatcatcccgaccgggaagatggagaagcttaccggggacgcgcagaaactctttgaaatggtcatggcccgtttcctggccgtcttcttccccgctgccgtgtttgaagacacgcggagaaccacgctcattacccaccaggacggcgtgacggacgctttcctgaccacgggccgggtgcttgtggagccgggctggcaggccgtttacggacggaaggccggcacttcctccaaggaggagctggtgcccgtccgcgacggggagcaggccgctttgcgtgagattgaaatccgcaacgccatgaccaagccgcccgcccggtacaacgaagccacgctgctggccgccatggagggggcaggaaaactggtgcatgacgaagaactggccgccgccatgagcgaacgcggcctgggcactcccgccacccgcgcctccatcattgaagggctgatttcccaggaatacatcgtccgggacggccgcgaacttctggcgacgcgccgcgggattgaactgattgccctgctggaacgcatcggcctgaaaacgctcacctcccccagcctgaccggggaatgggaatacaagctcaagcagatggaacaggccgccctgccgagggattccttcatggagggcattaagaccctgaccggggaaatcgtgaagagggtgaaggatttccgggaagcccagcagcaggtggaactgccggaaatggaattggactgcccttcctgccatgcccacggcctgaaaaacacgctggacgccgtttcctgccgttcctgcaagttcagcatccgcaaagttatctccggccgcgacatgacggatgaagaattgaagacccttattgtggacggcaggacgggaattctccacggatttacctcccggttcggcaagccctttgaggcggggctggaactcaacgacaaattccgggccacgctttacttcccggcgcgggaggaagatgaagccgcaggggtggaggaagccgtgaaagtggcttccgtcgccattccggacatgggagagcatgatgtgatggaaacggccaaggcctggaaaattccttccctgacccttggaaaggaacatgccgccgtctccgtttcccggactatcctgggacgtgaaatcccgctggaccaggtattgaagattttggcggaaggaaaatccgatctgatgaaggggttcatttcgcagcgtaccaagcgcccgtttgacgcttatctggtcttcaatgcaaagacggggaaaataggttttgaattcccgccgcgggaaaggaaatatcccgctaaaaacgctgccggaaaaacggaaggcaaggcggagaagacgggccggaccgccgccaaaactgccgggaaagactccaaatccgggggggctgccaaaaaggggcgcaagcaataacggcagcggaaacattccgccgggaacgaagattgggaaaagagccgggaaaaagcttcttcccggctgttcccgtatgttagcttgaaagcgcacccctggattcctgacgatgaaatgccttttatttgctgtgctggcgtggtgcggcgcggtttgtgcgccggcggaggaatatgcctttccgggggaacgggaatggatttccaaatttggagatgtggtgaagggcagtttccattcctgcacaggggccggggcagttctgaaaatagggcgaaggcatgtggaaattccgttaacccgtctggatgaggaagacgctgcgcttgcggcttttctgacgggagcggaggcgcgccggaacctgaaactggccgcgatgctttggcctttcctgatgaaggaactgcagaaggtgacgtggacgccggcagaaaagaatatctcgccccggtatcatgaaatggcccggaagaagaatgccggagctttaacgggaaccagaaaagtggatggactggtttgtgccacatcgctttccatcattcaggggcctccgttccgtatccgggaatacttccgtccgcaggcgcgtccggaaagcggcagggggcagaagaatttcgatgtggttctggagcaggggagccgctgcgcttattatgatatggataagggtgttcttattccctccaaatgcctgtctgaggaacggacggaaatgcgcgctcccgtttcctctctgcttcctccggcagaacagcttgccgcgagagaatcaaaaaattacaggaatgcggattactccctgcttgtggaaaaccgccccgtcaagggagcctatgaaacgtgcaagcccaattccctgggaagaaaaaagctggtcatgtactggaatacggagggtgaaatggtttgcggcgtcatgaagctggactacgacaacatgcgcgtggccgcgttattcgatggacggcggaagctgatgaacgcccctgggcttggatatgccgtgattctttcccggctggataaaaaaggcaggggcttgaaggagaaaggccgttactaccatgtggcgctggctgcagacggcctgcccgtgtattatcatgagggcccggaagatgaggccgccatgaacccgctgctttacgggaaactacgcgattccgagaaaaaggcggctctggcggaggagaaaagacgtgaacaggcattccgggccaggcgggaagcccggcggcgcctggtggaatccgccaggaagcgtaatacctgaaaatagttcctgtcttttcgcgacgggtatccttcttttctggagagcgttcgtgaatgttcttctcaggagcgctgccctggcgtatttccggattttccagtctttcagaaaggctgattatttattcctgccggggaatttttcagaactatccgaaataattaaaaaacgctgttgttatccgttatctgagagttccacggtgcggaacaaacccatcacacggattcggctggctctttttccagcggtttgtgatcttctatcaatcttttgatatcttgtcttgtttttttatctctcgattttcctagctttctgtaaatatcggtcatgtcaaagtagattaatttttcctgcccctgatcatttcttatagaaataatctgaatatatttgtcatcatgcatggtatatatgtaccctagtatgccatatccctcatagtgtttcctgatatattccttctgagattccctgatatcgtctgttttcttgattcctgtaagaataataggattgatgattgaattttccctgtcaattttctgactgccgggaattacatcctccgaaccggcggcattattaatgcaaaaacaggggaagcaggctatcgacaaaaaagcaattttcagtaatggtttcatatcagtttatttattaatcagttttatttatttatgttgtcattgcagccgacgcaggtgcagcctacttcgttgcagttgccgcattgcaaaccgcattcttctgtcaaacgcagccgggccattgcgatgactgtgctttctccttctgcatatgcctcggctttgccctctttttcatcatctgtaccggttactaccggggtaattgtctttcgcagcggtattggcccccctgtctcacccgtgtgatgaacacttgtatacttacaggatatatagactgtgtaagtgcgtttggcgttggctaccctgactggctctatgtttaaattttttaattcgtattcacattttaattcctttgcattcccataattgcaaataacaaaggtcaaaatgcccaataactgcaatatctttttcatcctaaaattatgggacaattttgatatatgtaaacatatttttaatatgttttacataatgattgcttgatagatagttacaaaaatatctaacaaaataataattatccgggaaagaccccggggaggatgaggcgctgaataggagtgtccggcgttccaacggagaagcaacgccttcgcatctcgggagaagttgaaaatgcccggattggctttaattccgcccgaaggcgcggattttaccgggggcatgccgccatgctgcggcgttcggcaaaggcacagttgagctgcggaccctttatatttatccgccatacgggataaaatgggagattctggtatgccgaggggccgggattccactaaaatgccatgtttctggcatgaggaggctgttttctctggagcctttcagtttgagttcctgctggttttccatgaacatggtgccggattgttccctcaatgcttccatatggcgggtaagaagctgctggcttcgatggtccgcatctgagcatcctgtgaaagcgcttcatggttttcaagtttccctgttgatgttgagtctcccgcagtctttttcgctccatccggagaggatgggaccggtgaatcggattcaggtcaaataacctgttccggggtggttcaggaggcatcaaaagctttcagcactatttcttattcccggtccgtgtcccggattttgatattgatgaagattgttcccggacgggtgttatttgccgtcttttacggccgtgtacattagccgtatcaatggaggcggatcctgctttccgcgagccggagatgcgctgaattcccggtgttcagccaatgcatattttcagggaaagaagtgatttctgttctttcctgaaacatttcctgccttctttatgccggaagcggcaaaggggcgtgcggcatatgcggcagtattatcttcctgcctggaggcagcggtagtaataatccacgcgggaaatgaaccagctccatttgtacccggggcgcccattagtcatcagaggggcggggcaattcttgccggaccagtagttgtgaggcactacgttgcgcagggggacgttgtagcgcatcatcagcagcgcagccagcttggccgtcttgttgtagatgacgacagggttatgcgtggtgcattcacacatttcaatggctacggagtattggtctcccggtccggaatggtccgcatggtggccggtttccgtagtggggatgtgctggtaggcgccgaattggtccacagtgaagtgccagttcaggctgcgggacttgccgctgttcaggtaacgggagtgggcattggcgtctcctttggggttggcggtgctgtggatggtgatgaagcgggggcgcatggaggatgcgcgcttgcgggcatacgtgtttttgggcatgtaggaaactttaatgcctacttcacggcccatctggccgggtgtgcggggaactaccggcgccttttgaattttaaaggagacggccggcggcctcattttgtcgttctgcgaacagctgcagaacgtcagggcggcgaatacggcaaaaaagcccgtccagacaaatctatattccatgcgtttgttctaggaacagcctggaaggattgcaagaagaatttggaattagttcggatgaactaatcaggccgtgccgtgaagttgcaggtatatccggtgcggatgagacggacgggccgcgccttcgggaggaaggggcccgtccgcgaggggaagccgtaccgggaacgcccggtacatatcccgttatctgaggatttgggtaaggacatattgcaggatgccgcccgccagatagtattctttttcaataggcgtatcaatgcggacgatgacaggcacgtcaaatgcttccgcatccgcgggctgtacgcgcagggtgacctgctggcgcggagcgatgccgttgttcaggcccaggatggagaaggtggcgtccttcaacggagtgatgcggtcataatccgccttgttggcgaagttgaggggcaggacgcccatgccgataaggttggagcggtggatacgctcaaaactcttggtgatgacggctttgacgcccagcaaattcgtgcccttggccgcccagtcgcgggaagagcccatgccgtagtcttctccgccgatgacgatgagcggaacgccgtcctgagcgtaggccatggccgcatcatagatgaaggcgggcgttcccgcggcagggattatttccttgtccggggcgggaacggagcggctgccgaaatacagcgtgtaaccgccttccgtgccgtttaccatcaggtttttaatgcggacattggcgaaggtgccgcgggtcatcacgcggtcgtttccgcggcgggagccgaaggagttgaaatcttttctgtccactcccatgccctgcaggtacagccctgcgggccctgtttcccggatggctccggcaggggagatgtggtccgtggttacggaatcgccgaaaatgcccagggggcgggcatccgtgatatccgccagtgtgcggggctggccgttgaagccgctgaagaaaggagggtcctgaatgtaggtggattgttcattccactggaagacagagccttccggcgcgtatacggccgcccagcggggattcttgtccggcgtgatggtgtaaagctcccggtatgcttccgggttgcgggatttggcaacggcttccgcaatttccccggagctgggccagatgtccttcagaaatacggggttcccgctgcggtccgtgcccagcggttccgtctggaagtcgatgtccacgcggccggccagcgcaaaggcgacgaccaggggaggggacatcaggaagttggtcttgatggaggcatggatgcgggcttcaaagttgcggttgccggacaggacggaagccgctacaatgtcattgtcccggacggcctgttccagttccggatttaacggcccggagttgccgatgcaggtggtgcagccgtagccgacggtttcaaagcccagagcgtccagggattcctggaggctgttggttgcaaagtaatcggaggcaatacgggaacccggagcaatggacgttttcacgtgcggaggcacgttcagcccccgttcaaccgcttttttggcgagcagcccggcggcaagcatcagccccgggttggatgtgttggtgcaggaggtgatggcggcgatgaggatgctgccgtctttcagcttcgcttcttggctgaagccgtccaccggaacggggacgcccgccggggagtgcatggaaaccgtgacctccggagattccttcttgccgtaacctccttccgccacgggcatgctgacaagcttgcggaagctgtccctgatggagttcaggcgaatgtggtcctgcgggcgtctggggccggagacggctggttccacggcagacaggtccagttccagctggtccgtgtagtccagatctccgttacggggcattccccacaggttctgtgccttgaagtagttttcgtacgtagtgatggcttcttcgctcctgcctgtctggcgtagatagtcggagcagcgttcatccatggggaagaagcccatggtggcgccgtattccggggccatgtttgctacggtagcccggtctgccagaggcagggccgccgccccgtctccgaagaattccacaaatttgcctacgacgccgtggctgcgcagcatctgggtgacatgcagcgccaggtccgtggcggtcactccttcgcggagttctcccgtcatatggacgcccactacttccggcaccaggaacgtgacgggctggccgagcatcccggcttccgcctcaatgccgccaacaccccagcccacaacgcctatgccgttaatcatcgtggtatgggaatccgttcccaccagggtatccgggaagtaaacgccatccttttccatcacgccctgcgccaggtattccagattgacctggtggacaatgcccacggacggaggaaccacggaaaaagtctgaaaggcctgctggccccatttgaggaattcgtagcgttccgcattgcgctggaattcaatgtccaggttcttttccagagcatccgtgcatcctgcccagtccacctggacggagtggtccaccaccaggtccacggggaccagaggttcaatgacggaggcgtcttttcccaatcctgctacggcggagcgcatggccgccagatccaccagaagagggacgcctgtcaggtcctgcaggacaatgcgggctaccgtaaacgggatttcataggaaccgggattgttggcattccaggaagccaggttgtccacgtccttttcagtcactttcaggccgtcgcaattgcggagcagggattccagaacgatccggatggaaacgggaaggcggttcaggcggggatagccgttttccgccaaggctggcagtgaataaaactgtcccggggttccggctcccgtgatgaacgtactcttggcaatcttggtcatgatgcggaatagagggttaactgtaaacaggcggctgccctcctggcagtcgcgggtactatacaggccaaatgtgataaggcaaggactctgtgtgacggagggcggatttttcccccccttccgaagccggggaaattttgctctgaaccggggcggccgctttttccggcattttttctccatgcacgccgcaggaatcatggagtgcgtcatggaacattgaaaatgagttcgcagtattgtccaaccctgtgaaaggtttcaagatgatgaacgcaaaaaacatcttatcaatcatagcgggagcgttggcgctggctgcctgttctggcccgcaggaagagaatttgcgcatggtgcccctgaccgtgcctgcaaccgtacccatgacctcctacggaccgcacgcgagggtggttgtagcaggaattgattatacggaggtgcacgacgaatggatgaatcccgatatcatgaaaaaggctaccccgggcaatacgcgcgtggtgatcagccgcggtcgccaaaggggccagttgatggtgggggatgaggtagccatggattttcccgtttgcgtgggtaaggcttcccaccgcacgcccgtgggccatttccgcattacggaaaaggcagtgcatcatgtttccaatttgtatgatgcctccatgccttacttcatgcggctgacggacagcggaattgggatgcacgtaggccctgttttccagacgccgcagtcccatgggtgcatccgcatgacccgctcttcctgcgtgccgcttttcaaaactgttaaggtaggcacgcccgttacgattgtacagtaatgcccggaaaatttccgggcgcttttccggaagaaaaaattccccgcatttttttaaaactcatttttttaaacaaaaaaacgtcatccgccgctattttaataaacggcatgtagataaacggtacttgccgcaagtcgcattgcctcagcaacccgaaccctccatgccgctgccgatgaatgaatacgatacagtcggcagcggcatggagggaagccgtctgcttgaccgcagaacttggggaatgaacgggctgcccgtatttcgtgaagaggacatggtgcttgttctcccggggccgcatttgttcctccgtgttgtaaaagattaatggagaagaaggattggcctcccctgctttttctccggattatttttccgcagctttcctgtctgttccttcccggtgcagcaggggaaggtattttccataaccctgtgcttccatgtcctgttcaggaatgaatttcagggaggcgctgttgatgcagtagcgcagtccgccctgttccttcgggccgtctgtgaaaacgtggcccaggtgggcgtctcccgttttgctgcggacttccgtgcgcctcataccgtgggagaaatcctgtttttcctgaatcagttcttctttgatggggcgggagaagctgggccagccgcagcctgaatcaaacttgtccgtggacaggaataaaggttcgcctgtcgtgacgtccacataaatgccgggtctgtcgttattgaaatattcattgcggaagggaggttccgtcgcgttattccgcgtgacggcaaattgctcgcgtgtcaggacgcggcgcagctcttcgtccgattttttccggtaaacaggttcgttttcgcgggcctgggacgcttcccggaatttggcgggtggaatatggcagtatccgccagggtttttatccagatagcgctgatgatatttttccgcccgtgaaaattggcggaggggctgaacttcaattgccagaggctgcctgaagtgctgctggagccttttcagggacgtttctataacaggtttgtccttctcatccgcgtaataaatgcccgtgcggtattgaattcccctgtcgtttccctgtttgttgacggaaacaggatcaataatggagtaataccgttccagaagaaagggcagactgagttcttccgggtcaaatactacttttaccgtttccgcatggcccgttttcccgctgcatacttcttcatacgtgggagaagccgtggagccgttggcatatcccgcttccgtttccttaacgccgggcatcagggagaagtatttttccactccccagaaacagcctcccgccaggtaaatcgtttttaaatccttgttgtccatatgaggtttgtcattactgcttgcctggcctttttccccgcaggaaaaaaaggagagcatggcgactgcggccaaaatggcgcatgccagtccggccagtgtccatggtccgtggtaaatacgcttcataaacgctgtatggagtcgccttccggtgcgggagcagcggctccctgggccgggcaactgctgtcccccggcttttctggaaaggtaaatgattagacaacagcgggttcattccgttcgatacctgtgtccatatttccttatttctcccgtttttccgccttcatcctgtttttcagccactggtaaatagcctggtcggaggcgtccggttttctgcttgtctgcatgctgaatccgtatttggttcggaagttgaaaacggccagagaagggctcaggccgatggaaagcccctccatccgtatttccacctcttgcgggacatggctggagaagtcgaggcgtccggcattggtgacggtttccacatagtgtttcaggaaaggctggatgctggccaggaaggagggttccagagccatgcggcagcgttccggggaagaattttccctgacaaaaatgacggaaggagctgtgatggcatgggcgggccttaacgtattcagcggaacattccataaaaaggaaaacagccccgtgcccaggagaaaaagaaggacggccagggcgccaagccatttgacccgtttgtttactgattgatgacagggccggccttcgttcatggagagaagcatggcataatattccatggtgatccatgaaagaatttgccaggaagcagatgggaattcccgtccccgcatgagggaatttttgtactataacatgaaaagcatgaaaaaaaacgctggaaatcatgtatagtatcattaaatattaatatagtgtatgagaaaagattccatttttctttccatttttttatttttcctttttctgacaatctccgtaaataaatccctcgcggaaaaatatccttcgctggatgttccggaagacattttgctccacgtgaaagaagctgcttcctcccagtccccctattccggcaatcattccgtaaagcaggctgtggacggctctatggaatccgccaactggcatgttcccggagtgcatcatgtggagggggaatttgtgtttgaagtgccggagaccattcattacatcattttttccggagccaatttcaatgaaattgccgtgtccgccatgtccggctcgtcttggaaggaccttggaaaattcgatatcgtcggctccaggatgatcagatttaaaaagcctcttcaaaaggttcgaaaaatcaggttgacggttgattatcccgaaggttcctctccgtcttttaccgtacgggaaatcagcttttacaaaagggtggagtccgcacttaaccggaaattgctgaaagtatttaaggacacgagctgttcctccatcaatcccaggtgtaccctgacggacctcaaggctcttccggagtttttgcagatgattgcgaagaaaataaaatccggcgattatgaagacaaagaattccgcattgcttcctataaggcttacagccatccggagtttgctgcgaaggtgagaaatatcaacgccctgaacaaatttgacaatcctaccggaattgtcgcggagaaaggagatgaaattcttgtgttcgtaggacctacccatggagaagatattgggctggcctccgtttctccagcgggaatagagtcttcctcctatcctttgaatgaaggggtaaacaaaattagaattaaccgttcgggattgctttacgtgatgtatcacaccgatatcagcacgcccaagaagccgataacggtgcatattcctgtgggaagcggcatagtgaatggatattttgacgtgacgaggcacacggataaggactggaagcgtatgatcagcaacgccccgcatagcatgttcgatatcgttgggcggaattccatgatgattcttcacacaaagtacctgaaagattacagtccggattccattacgaaatccgtcagggtatgggatgaaagcgtcaaggccatgtggaaaatcatgggatttgacaagtatccccagccgcacaataaccggcagcttggcgtttccgtagaaggaggagcccatatgtttgcaacctggtattactgcggctacagtattggagatcagggaaatacgctgaaaaatgaagtgctcgctcctggagttcttcagggaaaccgcctttggggaatcgggcatgaaatcggtcattgctaccagcatccgttcaactggcgcagcatgtcggaaagttccaacaatttttttgcccagctgattctggaccaggtgaccaatgccattaatggcaatgagcaggcctccgatatggaaaacccgtgcaaatacctgctttcagaagcggtaaagggcatgccgttccatgatttgaacggctgggccaaatggggttttgctcaatattccttctatctgtatttccataagctgggaatcaatcccgaattttatcctaggctgtttgaatcattgcggcgcaagccgctttccaggcaggcgtatgaggtttccgaagcccatttggccttgtatgaacgcatttgcaatatcagcaggacggactttaccgatgactttgaaatttttaattggtttgtcccgattgaccgcaaggggcatcaatatggggattacagttttaaaatgacagaggaaatggcccgggcatccaaggcccgcattgccgccaaacggtaccccaaaccgaaatttcgcattgccttcctgcatcagcatggaaagacggtcaatttgtgggggcagaatctgcatgggtcccagctcaacggctattggaccaaatacaagcagaacgcaaaactcagcccgtctgtaagcgcctccaaaaaggataacatgattattgtgcggaatggggaaaatgcagccgctttctgtgtagtgaccaatggaaaggtggtaggttattatgaccgtcagaagtttgacgtttccggcgtggaatggaatgatacctctaaagtgtacgccatcccgattcagacggcggaaccttataagttgatttatgctgccgggcgttcctgaccgtgttttggaggtttgggaaaagcctcccggaaaatcatattccgggaggggcgggtattgggacgcctgctattcgggtgccttgaagttatatacgggcctgatgcgttccacgatttccgccgtttcatggatgttgtccagcacgctctcgccatccttgtaggccattggcgcttcatccagcgtagtgcgggaaacgcaggtggagaaaataccctgcatggaagcctcgaattcctccagggaaagattggctttagcctttttgcgggacatgctgcggcctgcgccgtgcggagatgaggaattgaattcttcatttcctttgccgatgcagatgacggagccgtcacgcatattcaggggaacgatgagtttttctccgcgtccggcccggacggctcccttgcggatgatttggtcttccgcaatgtagttgtgcacggtgtcgaaactttccagatcagctgcatcatccagcagttcatgcagtatcacgcggcggttcagggctgcgaagcgctgagccaccttcatatcccgcatgtagttcagcgtattttctccctgaaggtagcagagtccttttttgcgttctttaagataggcgtccggacaagtatccacggcgattttctggtagcgttccgcaatcttcagaccgaaattgcgggaaccggagtggatgcacaggaaagcgtgctctttcccttgcgctatttcaatgaagtggttgcctcctcccagagaccctacggagcggcggtgcctgtctttgtccgttctcagcacgtccatgcagatgcgggagatttcttcatccagttccgggtcgtccagcaaggcttgatgaacggagggacgggcatgcatcccggacgggacgcgctcgcgcaggcgtgcgtcaaagctggaaaaatccggcagtccggacagtctggcggtaagcactccgcagccgatatccacgccgatcaggttgggaattaccttatccgttttcaattccgccgtgaacccgatgacgcagccggctccggcgtgcacgtccggcatgatgcgcacccggcttccttcaaaggcggggtggttgcagacgtccctgatctgggtgcgggccaggtcttccagttcatccgtgaacacgcgggcttccgtgtattttccgtcaatggtgatcatggttttattcttttggttgaggggcgcggagatatgcggaaagcgccttcgcgccctgtgaccttgtcaccataacgcatttgttgactcttgcattatataagtattcatattatataactataaagttatgtttgagcatcttttcgcagaacggggactgtccctggaccgattgaaaaccttgatagaagtggccaaggccgggagcattgccgctgccgcccggggggatagtgcgcggcagagcctgtattcccggcagattaaggaattggaggaattcttcggtgtggaactggcgagccgccgcgggaaagtgctggctcttaccggagccgggtgggagctggtgaggctggccagtgaaagcctgtgcctgctggatgattttaaaagccggagccggaatctgccctaccggttcactatcggagccggggacagcctgcatgcttgggtggtggctcccgtgctggcgagtatccagaaacgggggctgccgtggcttttcgcgctggagaacctccgcaacagtgagattccctctaagctccagaatatggatatagacttcggtattgtgcgtaccagcgcgctggaggcggaagggttggaaagccgggtcatttgctccatggattatgcgctgtacgttcctgcagccctggccgggaaaaaggcgcgggggaagaaggagggttttctccgcctgctggaaatgttccccctggcaacgctggggagcggttccgggtttcatgcgttgctgaaaaggaattgcgctgagttcggcatcaggctgcgggtgcactgtgaaacgcaatcttttccttttgcggcccgcatgttgaagagcggagcgttcatggcaatcctgccctgcatggcggaaaaagaactgggggaaggatttgtcaaggttactcatccggcgctggacgggctgtcccgcagtatttccctggcctggaatccgcggttgctgcgcgtgaggccttcagccaaacgggtaattgatgttttttccatcccggaacgggagtgatggaaggaaaatcaatcagaatccacacccaatttatttttacggtagtggtccagggagatgcggtaaaaatatacgatcgccagcaaattcagcagggctcccgttccgaaggcccagttcaagttcaggtatgcgtaaattttgcctcccaggaacatgcctgttcccaccccgatgtcaaaagcggtgaaaaatgtggaattgacggctccccggtggccgcggtccgccatgttcagtttcatggtttggaacgtggggatgaaaatgccgaagccaaagccgatgaggatggcggaagcgtaatagatccattccagcggcgccagcgccagcgcgctgaaactgacggtcaggatgctcagggagatgacggaaagctccgccacgcgtccgcggtcgatttgcctgcctaccatgaacctggagaccagcatgcccagccccatcagcgcgtaaaacagcccggcgtatttgaacccgtgcatttccccgtacagggcggaatacacggccaccacgccataagagaaggtggcgatcatcacgttcaccgccagcggaatgcccacgcgcagcacaagacgatccagtacctttttaggcgtttcatacacgggctcctgaacagggctcctgggaacgcggatgagagatgcaatgcccgctccggccaggcacaggagcagggagctccaggtaatcacgtaaaagccgtactgctgatatacctgaaggccgatgacggggcccaggcacatgcccagcgtcattgtcatgccgaagaagcccaggccttccccgcggcgggcaggggggatgatatccaccgccattgtcggaccggaggtggtcatgcctccccagatcaggccctgtatgaagcgcgtcaggaaaaacgccagggcggtggcggccgcagcataccctgaaaaggacagggccagcataatgtaaaccgtgatgtaaatcttcttgcggtctccggtatccacccggtgcgcgaaccaggggcgggagataatggcggccagaacataaatggacatgatccagcccagccagccggaggagacctgcaattgtcccgtcaggtacagcgggagaacgggcaccagttcatagaaggccagccccgtcattaagttggcgcaacaggccaggatgtagtctcgcgtccagagaggcgctttgacggatggtgcggtttccgccgccaattcatctcttgtccgagtcatgcaggggttgtacagccgttgggaaaagtttcaaacggcctgacgtgtcatgatgatgagcggggggaggaaagccctgatgaatccttgttgggagacgttattcattttcacgggaaaaggttacgcccaccagcgtgtctctcccgtcaatggcattcagatagtcgaatgcttctccgcagggtgtttcgttctcaatgaggaaaatgaatgctctgctctggttgatatgttcatttgccatattggcgaaagcctgaaggtcgtttttccgggatggaccggatggttttttctggatacgccagtaaacaagctggtagttccctctttccgggtaaggggaccggatgaatttcacgatgggataaacgggtttccgggaaggtgttttgttgaaaacaagaaagtcatcttcacggaaaggatgttccagaacggcatcgtcgggaaggcagggaatgtccgggttcatgtctttttcagattctggatcagattccggggccatatccgtggagacgggaagatcccagcaaattccattttcaaaggcggacgcgatggcatcccctcttttcaaacggagattattcacgccatgcgcataagcctccgatatgccctcagcgatgcggaaccagggaagggacggattgtccagattgatggtcaggcatctttcacaggccgaatccgtcttccattcctgtatggggccgggcagttccgatgcgttcacgattatttctccgggcagcaaggcgctttcctttttagagcatgccccgaagaggaagctgatgaagagagggaggaaaacggcaggaagacgaagaagaagcatttattcattcttcttatatagtttttattgcatgtcaaaagaatagagagtgcggtacatgccgggaaagatggcgctgtctcccgctccggaatatgccttcttttttgcgtgcaggacggcgcgggcatggtagggtacatggtatgagcgtaatcaccaagcgtggagacagcggagaaacggacctgatgttcggcaggcgtagtcccaagacagcgccgcgcattgaagcttacggaacggtggatgaattaaattccctgattggcgtggtgcgccattccggggtaagctcccggacggtggagatgctggacggcgtccaggctcgcctggtgggtgccatgggggaactggccacgatggaggaggatttgcccaaatatgacgccaaggggtacgcccgcattaaggcggaggatgtggcttggctggaggaacaggcccatttgctggaaaaggaatgcgacatccgtttcaaaggctgggcccgcccgggcaaggaaggatcgctgggatccgcatatttggacctggcccgttccgtctgccgccgtgcggaacgccgtgtggtggcattgaggctggatcatgccctgagcaacgtgaacacggccctgttcctgaaccgcctttccgatctctgctgggtgctggcccgttttgaggctctggccgcaggggaaaagatccaggcctgagcaggccgtttccgcccgtcctcctgttccggcatgttgcgtatctgcgcgattcccgtgtcgggagaatctcgtgaaagaatggttttgccgcagatccatgtccgggtggcaattccccggaatagttctccgttgtttcctggggacggctttccggttagtccagcggcaggatggaagtaaccagcattttgaatcgttcccgggcaatgacggaatgaggtactccggcgggaatcaggaggctctttccttggggcagattaacttcttcattgcctacggtgaagtaggccgtcccgtccagaatctgtatcagcgcaggaccgggcgtctggtgggtagggaggagttgctcgctgtcaaaggccagaatggtcatgttgactcctttggagcgtacaagggccagactggtgatttgcccttcgcggtaatcagtcaggtcggcgtaattaaagggagtgcgttcggggatgtgctgaatggctgtcatgtaaattggacacccttgttggcccttcccgtttcttcatgacaggcttccgggaaaaaggtccgctccagacccgggagcggaccttggcattcagcattcatatggtgcttacttacggagtcagcgtcctgaattcataggcgtgaggtcggattcacaagtaaacaacggtcattctatacatgaaaaatacaatttacttcaagaaaaattgtgtaggaaaatgcagatttgattctgttgcagggagaatcggatttgatttccggatgggattgtttccatatacgggcgtattgccgtcagcggttccgccgcccgcggccggatatgcccttctcctgtttggcggggaaggccgtttttcccgtttgccgcggtttctcccgtgagacgatggcgaaatccgcccactgctgctccctgtccactttcacgggaatgacgggaacgcgcagccctgcgcacagcacggaaccgtggtcgtttttccagcggctggcaaacgcctcatacacccagcggccgccgggaagcttgtccggtttgaccagccccttaatctggagacgcgggatttccagcaaaacgccgaagtggcgcgtttccgtaaccagagcttcgtgcacttccggatgatccgcgtagcactggccttccagccattcgaagagcttcatccggttcgcgtccttttccgcgctggcggaaatgcgttccgtttctgaaatgtgttccgcgtcttcctccagcctgcctgtactgcctgctcctttagctcctttgggagggttggccagcaggggattcagggagcggtgtaccaccagatccgcgtaacggcggatggggctggtgaagtggcagtaattgggggtggccaggccgtagtggcccaggggctccgtgtcgtacctggccctcatcaagcttttcaggagcgccagcttaagcaattgctcgtccggggaacccttgatggatttcatcagttcattcaggtactggcgttggtcgatatcgtgcacgggatgcccgtacagtctgcacaactggccgaattcaaaaagtttggcggaatccggttcttcgtggacacggtagatggtgggacggttcccgtttttcagggccagggccacggcttcgttggcggccagcatgcactcttcaatgagctgatggctttcatcgtactcttccgtgatgatgcccgtcacgcggccgtccttgtccataacggctctcacttccgggaagtccagatccagggctcccttggcgtagcggttgcggcgcagaatggaggccagattccaggcttcccgcaccgtggagggaacttcccctttgtcgtttcctttcagcatggcgaaggcctcctggtaggtcaggcgcgccttgctgcggatgaaagcgtcagcaaagcgggcacggagcatcttcccctttttatcaaatttcatttcgcatacttttgtcaggcgcacgacatccggccgcaggctgcacaaatcgtcggaaaggcggggcgggagcatcggaagaacgcggtccggcaggtaggtagagttgccgcggcgcagggcttccccatccagcgagccgccgggcttgacgaaataggagacgtccgcaatgtgaacggccagcgtccagccggacggagtggccgtgatggaaatggcgtcgtcaaaatccctggcgcttgccgggtcaatggtgatgacggtacggtccgtccagtcttcccggcgggcgagttccccgggggaaggtgtttgaggcagcgtttccagctcccggagcacggaggcggggaatcccacggaaaggccatattttctgataacggcttccatgtccacgtgaggctcgtccggatagccgagcacctccacgattttcccgcgcggggctttcttttcctcaccgcaggttatgggctccacggaaaccagttggccgggaagcacctccatggcgggtttttccgccagttcaatggatgacggagagcttacgccgtcccccagcacgcggcccggcttgttttttccggtgcggaagacgccaagccatcgggagcgcgcgcgttccgtcacttcctccacgcgggctttcatgtcggcatccggggaagaaaagcgatttctgcggatattcctccgtcccctggctgccttgcgttccatgcgcacggccactcggtccccgtccagggcggtgcccagatggttgggtttaagttccagttccggaacggcttccgtgtcccatcccagagccgcagcggcgggatccccttttctggggagaaaaagaatcttgccggagcgcaggatgcggatcatgccatgcaccagattccggcgttcccgttttaaagcgtacctgcccttttgcagacgcacgagttttccttcctcctccatctggtccaccagggcgcggaaatccagcttctgccgggaatccacgttcagggcgcgggccagttcggatttgctctggggttcgtaatgtccgtcttccatgtgacggatcaggcggtctttaagggaattattcattttgcggaagttccgggaaaaggagttttccattcccatggatgccatcataagaaggttttcgcgccgcttcaaggcgcgggcggtgcatgccgcgttcgtcagcggcttttggcctgctggcgcacctgccttttttacggactttatccgcaagacgggctttgatttttcagcgtataacgtatttgggatgaaaaacccatgctgtttataaggaaggggctgccgttggtttcttcaacctgtggctggagaaataaaaaatgtcaaatggaattccaaaatgaagaacaaaaccagcaaggcttttcaacggacgttgctggctttgaccggcaaggaaaaaactttgggacctacatacttgactaaccaaactattttataatattttcattatatcctaattatttgaaggtgaacaatatagaaaaaggaagatcaacttacgatcttcctttttttctatcaaaccctccgtctctttaggagaatacaaacaattcctaatagactcatggtagaagtcgatggttcgggaacaacgtcatatcctattaatttgaaccatccctttcccgattccccttcttcataagttaatttatatgatccgtcagagttgaacatatcaatatctgaaagattataattcgtcaaatcgcccgaaaatagttggaattcatcaccggaagaaatcatactcaaaattttcgtctcatcaagatcaagccttatttgactactcttatccatgaaaacagaaccagcggatatatagtagaacttatctccattcccgaagttaaatgttaaaaatgaatttttcatttagtgatagagaaaacaaattagaatttttagttatgttccaacttgattttgttaaatttatgttaattgaaccatcattttcttgagaagtgtaaccatcgaaagaagtaccattctgaatattaacagttaagtcagatgaagcggatattctctgatttttagatttagacaaatccacgttattaagactaacttctagatttcctgcacctgaaatcagtgtgttgttattaactgaagaaatagatgaatttgtaagagatatagtactactatctccaaccaagaccccactggtactggattttttattttcaatatgtgtattataaagagttacttttgaatctccgcttgcggatatagaagccctattatctcctgttgttgatattctgataattccattgcctttatttgatattgtagcgtttctactcgcgtggatcgccgtatctgaggcattataaatttctacattatcaaggagaaggtttgaattattccagagacgaatacctgttcccccatctgcgtaattataaattttcgtattgtagatagtagatgtttcggtcatgtcactcagttctatcgctgaactgtaaacaccatacacgcctccctttgatacggtaactgaggaccaaccataattcgctcctaaattgagaaatttttcctccttttgagtaaatcgccgcatccccaaaagaactagatctacaaaccgtagaaactacaatattagttccggtataggaagatcctgaagaaatcaataaagcgcatgaaacatttgaggaggtattatgatgtttttcgttatcttctataatatctccatcaatcgtgacgtaggcagttttttgtgccgccaaacaatagggtatggtgtatgaaaccaataggcttagggaaatgaatagggcctttactgatgataatgtcttcatagttcttatctcgttttgatggattcccggaatgggaactcatccgcatagtacaagatagaaactgattgtaaacagcaaaatatcctaattcgggttatttctgaagataggttatcctcagaaaatgctcaggaagagggatagtctccaagaggaaaaactgcgttcattcctaagaatgaagcgtaagaaaatgggactgtctcaagtagaactttccgagatgtgtaatcttcctcagtcattcgtctccaaatatgagacaggagaacggtatttgaccttcttagaggtattatctctttgtaaactacttaatatcaatatacttgatttgattaaggaattggagtcttgaccattttagattcctcatacagaataattacgtcaaattatattcttttgaagtgcgaaagaagtttgacgtaattattcaatttatgaagaaattatctaattcaaccttcaaagtgaaaagagggaagtcattcttcggatgtaagtacttctatactttattacctgatggattttgtgccattggattcactttgaagcatcttaaaaaacgagtaaggtatcaattaagaaaagagtcttaaaaaatatcaaactaatttcccgatgagcatttaaatgctcatcgggttttattatttataaatccttaatatcataaggtgttattgtgaaaccaattcacaatacatcattctcttaccaatcattttggtaatcgtatctcctatacattccattacttcaatcttggaggtattatgcctataggaaaactcatggatatacctcttcaaatgcttaggagacatgtaatggtaaactccataataacctcttttcagtagagaccagaagctttcaatggaattagtatgaacctctccattgacgtattgtttccccttatggttgacaaactcatggacaaatccgacaagtcctttataggatttgaactcatccgtaaacacattggaattcctctctacatgttttccgatgaatccttgtaaattgtaagcggatgtatcgtcgatatgtttgacgattacttttccgtttctctgtttggctccgatcacaatcaatttacctactgaacctcttcccttgttcagcttcttggaaaagtgtttgttggattcctttcctccaatgaaggtttcatctacttccacaataccgtccaacttctcctttttatctttcatccaaacttctctgatcctgtgacagaggaaccaggcagtcttctgagtgattccaagttcttttgaaatctggatggaggaaatgccttttctggaagtcgccaacagatacatacacatcaaccatttgtgaagaggcaatttggattcctctaaaattgtaccaaatctgacgctgaagaactttctacaatctttacagcgataaggcatcggtttttgatccttacattcggtgatataattggaaccacaatgaggacaacggacatgaccattccatctttttaactcaaaatatttccgggcggattcctcattaggaaatttggagaagaagtcatagagagaagtgtatttgagcttagtttttcccatatcatcgcttggttgatagggaaattttgtcgtgttttgattggttcgtacgcgtttattttcagcgtattgagaattattttgtattacaattttcttacccatattgggcgagtagaaaattgttctcagaatttaatgatataaaaattaatggagctttatttaatagtcattaggataaacgtacacttaggcatgtgtctggactatatggagaatgagtaaaaatggcttgacttttgctttcttctttttcatcatatggtatgcgtttaaacggcaatcaaatttttaattttaccgaactaacaagtattattgttaccctatcgaaggaaatacaaaaacaatctattgaatctagtaaaatagttcaaaatgataatattgattattcaaaattcattcaaaattatttgatgaatgacccaaacccttctttatcagaagaacaatgtgatgaactattacgtcgtttaaatttacttcatgatttatttataaatcaatatattcaccatccaaccttgacttttggatggcgctccgtagtcgttttaatgtctttttgcctaagcgatacttttgagaaaagcaccataatagaagaaaatacatctttgatggaagaagtctgcaacacaaaagatccattttttgaaagattgtgtaaacaattcggtataaccaaaggcaatttttaccaagaaccataaaactacttatcttcagttcactaaattacaatatataattttttaccaatcttatgataaaaataaaattggctgttttagggcacttgccgtatctaattgatatttcaaaaataataaaatggaaatcttgtttatttgaaattgaaagagaagtaggaaaatatccaattacaaccgattcagatggtcccgattggagttatagtgattctaatcttgtaagtattattcctcaaagaaatagtgaggatattttgattgtaattacaaatgttcctctagaaggtaattattttgcaagaagattttctgataatagagtatgtttgacctattatgagatggtagatatattgacaatatataatatttcactagaaaatcttattctaagggttttatattctatatctatattgtataaaagatatagaaatcgtattcctacacgtcatgaaccaacgaattttgctcatgatgaaacaagaggatgtctatatgacatgtgtggtattaaaacagatataattcattctcttaataaaccgcagttatgtgatgattgtgttcatgatataactcataatgaaaatccaaggatcgatagaagtattattgataaagttcaaattgagttaaagaaaatacataaagaaagatattatcaaatcttggattttgtaaaaagaagacctgttttcactcttattttatcaacaattataacaattgttcttggtgctgtcggatcagttttagcgacaatattattagaatattggaggtgatctgttggatggttagtcaagtatgtaggtcccaaaactttcattaaaatgatgagaagctgccgacggtttctcatcatgtggaatgatgggaaacatatgatgcaggcccatgaatttatgcaggaccgtttaagagacattaccagcgacgcagtaaaaaagggggtggccaacatggagagagaaatgggtatccttttaaagagtgataaaatattgaaaatgtatgatcaaaaccccggaatttgaatggagattgaccattgttcaggtggagattatcccggccggagcgtgccctccgtagtgccaagctgttctgcgacgtccaattcccggataagccgggccgcagtgcaggaaccgtccagcagctcccggtagcgggacaccagaaggcgtactttttccgggggatcatccagcagttccagccggaaacgggaaaggcccagacggcggaagtcctggaggaagccggctcccgtctgggcgcgtccgttgaacagcgtgttccggcacccggcgtccgccagcaggggatgaagctgtcctacgcggtcacgcagctgcacatgatgccgttcgcaggggcggccgcagttcttataactggtgccgttcgacaggaaggtgcagaacacgcaatgctccatatgaaacatgggcatgtgctggtgcagcgtcagttcaaaccattccggcggcgcagcgcggagcaggtccgccacctgttccgcgttcaggtcgtaagagatggtgagatgagccagatttccccgtttcttcaggatagccgcgctgtacggattggcgacgttcagggaaaaatctccgatacggtgcaggggggactggcggaaatattgcgccgcacccaggttgcgaataagaatgccgtcaggttccgcccgttccataagtttgaagtatccgacttccgagggtttctggatgcggggcgtcgccaggaagacgggaatgctttttccgtgttcccggacggtttttatgccttccgcatagtcccggaggtcttcaaagtccagataaacggcatttgctccggcatccagcgcggcgggtatttgctccgttttgcggcacagaacagacaaatggggaggcatgtccggaacggctgttcccttcggcagcggaggaagggtgaaggaggccggaggatgagagggaacggaggattcttttgccttccgggccgtttgaattcgttccaccagggcacgccttgtctggttgaggatgctgagcggaagcatcaggccctccggcagccggcagtcgcaggaggccaggcggaatcccgttccccccagcctgccgagctgttgtttcagcacttcgggagtcagagggcgtttttctgccgtctgaaggggctggggagattgcacggaacatccgtattccggacaggcaatcgtcaggggtttcccgacggacccggcacatgtcagatggaggggaatggtggattcctgcaagtgttcccgcatttttttcaactccgcgttcagggccggatcatccgttttccagagtttttgcccgggtttaaccctgctccagtcaatacgggatgcctttccgtggaaaaaaaggcggtttctctgcactttccagatacgtccgccctgttcttcattgcggtcttcccctgcatcaatgacgaagccgtccccgggcgcgagcggaatgcccccttccggcctgatatccagccagccctgaccgctgttcataatgacgcctgcgtaggcgcccctctttttaccgtagcggccgtgggtcagacgcgggtggttcgtcccgtccagccagccggtggaaaagccgcgtgaaaataccatttgcagtgcataacggtcgcgtgcggtcaccatttcatccacaggtattccagcgcaggcggcgtccagagcttttctataggccgccgttaccgccgcaacgtattccgggcttttcagacgtccctctatcttgtagcttttcacgcccatgcggaccaggtccgggatgcggtcaagggcgcacaggtcctgcgggctgagcaggtagcgccgttctcccagaggaacggttttgccgtctacaaccagggaatagggcaggcggcaggcctgcgcgcattctcccctgttggcgctgcgctgtcccaagctttccgatgtaaggcactggccggaataggccacgcagagcgctccgtgtacaaatacttccaggggaatgtccgtatgccgtacacattgcccgatttccttcaggctcagttcccgggccaggacggcctgcttcaggtccaggaatccggaggcgaattccagcccgtccggggaggaaagtgtcatctgggtggaggcgtgcagttccagcttcatgccgggaacctgccttccccattccgtcaggcagcgggcaagcccgatatcctgcacgatgaccccgtccgcgccggcggcattcaggtggcccaggtaggagagggcgtccgccagttcggaggtaaaaatgagcgtattcatggtcacgtaccccttcacgccgtgtgcgtgaaggaaacgcatcagttccggaagggaatccagcgtgaagttgtctgcgcgcagacgggcgttgaaacggtccagaccgaaataaatggcgtctgcgccattggctacggcggcgagggcgcagtccatgtccccggcgggggccagcagttcggggcgcaggtctccgggccggagggcggaaagggttatgtcgtcggaagtcacggagaaaagcaaaaaggacggtaggggttattgggcggtgctgcgtttttccgcatggcggagcagagctttcaaatctcccagaaggaacagggagcctgccgccaggaccgggagcggggaggccagtgccgcctgcagcccatccagaagcgaggaatggatgaaaacggggccggtttcctgctcgcccagcagggcagccatttcttccgccggcatgatgcggggggaagtgcagggaaccaggtgccattctccggtaatttcccgcaaaaccggaatcatttcccggatgtgcttatctgcggatgcggcaaaaaccagtgccgccttccgtcccgggaattcctctttccacgtggacgcgagcacgcgcgccgcatgttcgttatgagcgccgtccaacaccagggggggcgtctcaaggcgttcgaaccgtccgggccactgtaccttggccaggactgcggcggcttcggatggggaggggagggaatggagccgcctcatggtttccagcgccagggctgcgttttcccgctgatgggctcctggcagggatgggatgggcgttttccggtccgcccgggcaatcgtgaggggagaacggcggttttgcgccgtccgttcgatgacggccatgacacccgggtgctgcatggcagttacggacggttttccgggggcgatgatggccgctttttccgcagcgatctcttccagggtatctcccagatactgctggtggtccaggccgatgggggccagtacggcgatatccttgggtacggcgttagtggcgtccagccttccgcccagccctgtttccagaatgatgaagttcacgctgtttttccggaagtggcgcagggcgacggccagagccagctcgaaaaaggtgggcggctgttcccagccttccgccagctgtttcaggaaggaaatttcttctgccagggcatccggagtgatcatgtccccattgacgcggatgcgttcagaaaaatctaccagatggggggaagtgaacaggcccgtgacataaccctgcgccctggccagggcctcaatcatggcgcaggtggagcctttcccattggtgccggccacgtggaccacggtggcgtttatccggtccgccccggctgccgccagcagcttcctggtattatcaagccccagcttgatcccgaaaaattgggtggaaaagagccagtcaagggcggcggatacattcatgggcggtattttaccacggaaaaactcccgttcaactccggtatggcgtggggactgtaaaatgccgccgggaacggacgcggcaaacacgaacaagctaccgttgctacctctcggtcctggcggggtttgccagtcgtgcctccacggggttcccggcggctcacccagtaaactaggtttgcagtgcagtgtcaaccttcaaagacatcatctccttctggcgaaagagagcagaatggagatcagcaatattacgccgataacgactgccgccgtgaagaagatttcttcttcctgtctgagccggctgcgctcctcttcgattttcgcgtctctgacgcgttgcagcccgtgcagggctttggcctgttcctccacatccgcctccgttcgcatgacaatcgtttcctcatggctgacggcctggtcgtaaggagcaatcatcgtgcggaattcggggtcttccgaaagtatttccgtctcatcataatcttccgccagaggggagttcatggtgtcccgaagactggcgatctgtctgtccacattgttttggaacaggcccaactcccttttggccttttcgtaagcttccgtctggtcgcgcagagcggcttccccctggccggtaatgcgctccagttcctgcggaagactggcctgaagtttgagcagatccgtcctgttctccgtcactttaaaattcctgcttttcgtgttggacgcctccgcgagctggatgcggttgatgtccagacgggtttccacctggcgtatttgttcctgaagccggtttcgggcgctgtccaattgttgtctggtggcgtccctcctgcttttgagttcttccacttccgcaacgcgccggtcatattgttccagcagatgggctattcgggcttccgcgcttcgggcattgggctttccgcttacgggagagggcgtctttttcccgtctttttcctggccggcttgctttattcgggcatcccagtatttgcggacggcttcttccttccgttgaatagctttctggagacgcgccgcctgctgttcgtgaagttccgcggcttcatcaaaacgggcttgggccgcatccagctccgggcagggttcccgctccatggctttgagggcttcatgcctgggtgcaaggccgttttgataataatcccagccgtagtatcccccggcgagcaacaggatgagaagtaggtaacgcatcaatgaaaaaaggtagagtcagaagtaaatctcatagtgggagttccgccggattttgcaaactctaaaatcagccatccggagcttttcccctcagcagggagaatgatgataaattcactccggagggggcgtagttttccttgaagccatactttcaagccatgtctattttctcatcacgcagacaatttctcaaatctttggggcttgcggccggagcggctgccgccggaaatgccctccccgggaaggctgtggaaatccctgccggagactatctctggaaatccgcctctccggcggctccgaggccttccggttccacatacatgggagggttcaaggctccccggctgggtcgcatcaggctggccttcatcggcgtgggagggcgcgggttctcccacctggcgcaaatgtgcgtgatggatggagtggaaatcgtgggcatatgtgatttgaaggaagagttgacgaaacgcggcgtggatcgcgtgctctccagaatggggaaaagccctttgggctattccggcggcgatatggaatacctgaccatgctgaaggagctgaagccggatgccgtcatcatcagtacggattggagttcgcatgccagaatcgcctgcgacagcatgaagcacggcgctcacgcctttgtggaagttcctctggccgtctctctggaggagctctggagcctggtggataccagtgaggccaccaggaaacattgcatgatgatggaaaacgtcaactatgggcgggatgaactcatgttcctgaacatggtccggcagggcgtcatcggcgatttgcttcacggggaggccgcgtatatccattgcctggtgacgcagctgggggacacgcgcggggaaggggcctggcggccggaatatcataccagaatcaatggcaacctgtaccccacccacgggttggggccggtagctcaatatatgaatttggagcgtggagaggaccgtttctgccgtgtggcggcgttcgcttctcctgctctcgggcgcaatgcctacgctaaaaagcatcttcccgccgatcaccgctggaacaatactccattcatctgcggtgacatgaatacggctgttgtcaagacgcagctggggcggaccattcttgtccagctggatgagacgtccccccggccttactcccgcgccaacctgatccagggaacggagggcacgctggctggtttcccaacccgcgtggcgggtgaaaagctgggcaacggcaattatcatgaatggattgaaggcagggaaaaactggccgctatttatgaaaaatacgatcatcccctctggaaacgcatcggggagctggccacgaaaatgggcggtcacggcggtatggactttgtgatgctttcccgcatcgtggaatgcctccggaacggagaaccaatggatcagaacgtttacgaaggagcttcctggtcttccctgctgccgttgacagcccgttccatcgcccagggcgggatgcctgtggaatttccggattttacccgcggagactggaaaaccaccatgccgctggtcgtggtttcatgaataacgccggggatgaaggggcgctgccctcttccggagagttcaggaaagaatccgttcttacgcagggtgctcagcagggactgccggaaaacagattgtttaattcttccgcgctcatgttcatgagccattgttcggggcctccggagaacaggtcgtccgccatgcggcgcttgtccttgagcatggcgtcaatgcggtcctcaatggtgccccggcagatcaggcggtgcacgagtacgttccggtgctgcccgatgcggtaggcccggtccgtggcctggttttctacagcggggttccaccagcggtccacatggatgacgtgggatgcctgggtcagcgtcaggccggttccggcggctttcagggacaggatgcagaagggagggccggattccttctggaaggcggtgacgatgttctggcgttccggaataggcgttcccccgtgcagggtaagcccggaacggccgaagactccggacaggagatcgtgcagatggggaatgatggagcggaactgggtaaagagaatggttttttcctgcctggcggcaatggaggcgcacagttcctgaagccgccggaactttccggagcgttccggcgcataatcgtccgtgccctggaactgggcggggtggttgcagatctgcttgaggcgtgccagaatgggtaaaatcagcatcaggcgggcagctgggtccggttcgtccagtacggcatgcagcatgtctatctgtgcttggtacaaggcggcctgttccggcgtgagggagcaataggccggtatttccattttgtccggcaggtcgggaaccagcgccggatccgttttcattctgcgcaggatgaaggggcgcaccaggcgtcgcagcggggcataaccgcgttccagggaacgggtgaaggattcgaagctttttctgctgcccagcagccccggattcagaaattccatcaggctccagagttcattcaggttattttccaccggcgtgccggacagggctatgcgtcgttccccatgcagggaacggatggcgcgggaacgggcggagcctgcgtttttaatagcctgggcttcatccagaataatggccgggaaatgcaggtcggccagggcggacgtgcgtgcggccatgccatacgtagtgatgacggcgtggcagtctttccggcgcagggtattttccggctgccacgggtccggggaggaagggtgcatgatgcgcaggataagctccggagcgaagcgttgcgcttcctctttccagttggacaggagggaggccggagccacaatcagagccggcaggccctccagccggccttttctccgcaatgcgtccagccacgcaatagcctgaagggtttttcccagccccatatcatccgccaggcaggcgccgaaaccccgttccgtaatccggtaaaggaaagagaacccttctttctggtaagggcgcatcagggcgtccagccgggaaggaagctccggtatggagactgggactttccccgccaggatgtccagggtctgccggaggttttgtcccggttccatgacacagtcttcgtccggttccggaatctgtacaagctggccggaagggccgttaaccagcattctcagaccctggaccagagggatgccgagggagctcatcatacgtgccgcttgagtccaccggtccattaagtcccggaccttccgggcgtccacacgcacccattcccccttgaagcggatcaggccgtctccgttgctgagcagttcccccagctcctccggggtcaggtctttgcctcccagagtggcggatacggaaaatttcagcagcctgcggacggaaagcccggaagaatggaccgttgtttcacttccggatgcgtctgccgtaacttttacctgtagtttgggaggggtttttttccatagattcaccatgcgcacaatgatgcctgcgcgttcgtagagcggcgtgtcctgcagaaaatcccgggcctccggagcgctccaggccatcggcgtataaatttttcccgttatccagcaggcgcttcagcagggggctttcgcgtgccgcttcttttaaaggctggagtaaggccagcagggcggtgtaattcccttcatgaagtttcagggcggtggcaagggggaggtggcgtacctggttgtccgcagcgctttgatgcgcaaaggtagccatgaaagcaaaggggcgggagcctgtggcgtcatcccggttttccgcaaggtggaaaaataccttgcctatctggttccagggcgcgcccaggctgttcaaccattcggcgggggtaatgcctcggacgcggatttcctttgctattgccttccgcaaatcttcaaaccatccggcaatgatgtccggagtggcatattccgcgcccggtacggggggaaattgctccgccagaaaagctttttccgtagcggaggccagcaggtggtccagaacggtatccacctcgtccggcctttctgcggcagcgtgcgccatgcgggtaagcgcctggcgcgccatgttcttgataaagaaggcgcccggatccggaacggtttcccagttggataccgccagggcatacagcccgtttccggttccttcttcaaacagacggtcgaaaggcggtgtgtccgtcaccaaagcaccggaggggaggatgcggaaaccattgatattccgtttctcttccggtactgcatgatagggatccggctgcatggctggcgggaatgtagcgtgtgcttgcagccgtagttcacagggcgaacgtcgtatctttgatgataggcagcttggacggcggaggattgagcagctccttgatttgtttcaggtaatcaatcagggctttgcggacatctattcccgtcggtttgccgttcccccgttggggaaatatgaaattgctgcacaggtagtctcccatcgcaacagtgtaaatgaccccgtttttcaaggtgctggtaatgctgggcgtaacaccgtccatgatctggtaggaaaatccggagcagtacacttccagaacgcctccttcgtcatcggtcggagacatgaatttggacaggatcagttgttcaatgtccgctttactcatggagcaggtgacgatcttttcccggaagggttccagctcgtaaatgtccctgatggtaacgggtcctttgttaagatggtttttggaccgtactccgccgcggttgtaaatggcaatatccgaatgggaggcctgctgaatggccttgcagaaaagggtgcctatggtgacgtgcgtgatttcttctccggcgacgcccacttgctggttgaaaagcggatttccggaaaatcggcggacaatttcctttacttccgggtcatcgggaatttcctcattcaaagaaacggccctggttgatttggaaaggatggagacgggatgttccgtggagaaaataatttccgtaacgcctgcatggctcaggctgtgtcccgtgtggctgagcagggttccggttctgagatgaccgctgggcagcatgacatgggtatggcctccaagaatgacgtcgatattcggagaatacttcatcattttcagatcattgccgtatcccagatggctgaggatgacgttgatggtattatggtggagccggaacctgtccgtgattcccttgtagtcttcttcatccggcagcttccatgagatgccggtcatcctcctcacatccgtggtttgaaggtctgccagtcctatgacccctacggaaatggacgttcctttaatcggaatgctgacatacggagaaaaacagttttccagagtaggggaaaggctggcgttggtaatgacaaacttggtggagggcattcccttgatatggtcgcgcagggcctcctgcccgtaatccagatcatggtttccgatggtcactacatcataccccagcttgttcatcaggatagtaaggggttcgccccgtttttcacagtcgtccacatagggattgcctatgaaataatcacctgaatccaccagcagcacgtgcggatatttagtgcggtattgctttaccagtgtggccagtcttgggaaattgtccagattgccgtggatatcgctggtagaaatgataatcagcgttttatcgggatccgatttaggctcctgagccagagagaacgggtacaggcatgccagagaggcaagaacaatgcggagcggaatcatgcagggtaaaatgataaatatacggaaaaggatgagatgggattaacgggcggaaacctcatgcgggccgtcacccacggagatgacttccagacggaccctggatacgccgcgtctatgcaggccgatgcggcttgcggcggcggtggtgaggtctatcaggcggttgctgtgaaaaggcccgcggttgttgatcctgacgacggttgatttgccggtttccaggcaggtgactttcaccttgcacggcatcggcagggttttgtgggccgccgtcatggaacgctggggattgatgtattctccggaagatgtcttcaggcggcgcgctttgccgccataccaggaggcatagccggtctcatggtattgcagggcatccgccacgctcatgggagtatacctttttccacgcacccggtagggcgcatttttgacatgcgcctctgcctcctgaacggatggctccgttttctgagcgcacttctccgtagtggagcagcccggcatcagaaaaagcaacaggacggggaggaaccatttcacgctttttacgtttaacacatattgatggttttgtataacaaaaaaggaacaagagttgaaatttaaggaatagagcagggcggaacaatcttttcccggttgcggtttaccagttgagcggcccggaaaaatgcagtatgatctcccgcatgaatccttccaaggtaatcggcctggtcgctctggcggaaaaaccgggactgggggaagcgctgcgcatcatgcgccgggaactttcccgccacgggctgggctcctgcgtcattgaaacgccggatgctctggaacgggctatcggacggtgcggcatgctggtgaccttcggaggggacggtaccatgctgaccgtctcttccctggcggccatgcaccgcgttcccctggcgggagtgaacctgggccggctggggttcatgaccacctgttccgtgcaggaactgccgcttctggcgtatgcccttcaggaaggttcctacctgacggatgaacgttccatgcttgaagtggtccgggtggggggagacggcgttgcggcacctccgcgcaagctggccttgaatgaagtttccctgatccgcgcccagtccggcaagatggtggacctggatgcggagatagacggagaattgctgaaccgctaccatgcggacggcgttctggtttccacccccaccggctccacggcatactccctttccgccggggggcctctggtctggcccatgtcccgtgtcgtatgcgtcacccccatctgcccgcacagcctgaccaatcgttccgtggtgcttcctgacaacatgaccatacgcctgcggccccgcgagcgccgcggccgctttgactccatggtctattccctggacggccgttccgcctatcccatcgaagtgggagaaagcctggtaatccggaaggcgccggaaacgctttccctggttcatctccggaagcagaatttcggcgccctgctgagggccaagctgcggtggcagggggcggaaatcccctcggacgatgaataggccgttgcggaagcccggcctccggcgggctgtcccctcactacggaattcctgcatccgggaacggtttcccatttatcgttccgcattggcgcaggggcggtaaaacgatttttttaggatgcgggcttgacgaaaaggcctatcctataatactcttcctgccctgccaccaagggggtggtagatcttaatcgcataaacgcgtaagaaatagtcatatatgaagacccacgtgaaaaaaggtgatgaagtggaaatcatcgccggacgtaaccacaagggcaagcgcggcaccgttctcgccgtgaatgcttccaaaggtactgtcatcgtagaaggcgcccgcaccctgaaaaaggctgtgcgcccgaccgaacagaacccggaaggcggcattcaggaaatcaacggcccgattcacatctccaacgtgaaaaaagtaggctaggccatccggtctgaccctgcgcttaagccatatcaatcattaataaagagctgacccgctaaaacaatgagtacaccaacactgcaaacatactaccgtgaaaaggtcgttcccggccttcaagcgaagcatgcatacaagaacgtgcatcagattccccgcctggagaagattgttgtcacctcctgcatgggcaagcacccggaccgcaagcaggccgtggaagatgccgttaatgaaatcgccaaaatcaccggacaaaagccctccgtcacctatgcccgcaagagcgtggccaacttcaaggtgcgtgaaggcgaacctctgggagcccgcgtaacgctgcgcggcgcccgcatgtgggaattcctggaccgcttcatcaatattacggctccgaacattcgcgacttccgcggtcttccctacaagtcctttgacggcaacggaaactatgccgtcggcatctccgaccagtccatcttccccgaaatcgaacttgaccagatcaagcgtcagatcggcttcgatatcattttcgtgacttccgctcctacggacgatgaaggccgcgacctgcttcgcgctctgggcgtccccatgcgcgaaccgaagaaggccgaagaaacccaaaccgccaacgcctaactatttcttaccatggccgtattaagtgatcccatttccgacttcctcacccgcctgaaaaacgccagcctggccggcaacgaggaatttaccgctccctgctccaacatcaaggtggaaatcgcccggattctgcaggaagaaggctacatctggaactatgaagtgaccggagaaggctccaagaagcaaatcaaggtgaagatcaagtttaccccgcagggcaagccggtcgttaccgatgtgaagcgcagctccaagccgggccgccgccagtacgtttcttccgaggacattccccgcgttctcagcgggcttggcattgccatcgtctccacctcccgcggtgtgatgaccggtgcgcaggcgcgcaagcagagcatcggcggcgaacttctcgcccttgtatggtaaccattaacatttcctaaacatatgtcccgagttggtaaaaaatccatcacattgccggacaaggtaacggtaaaggttaacggctcttccgttcaggtggaaggccccaaaggcaagctttcctggacgcttccggaaggcatcaccgctaccgttgaaggcaatcagctctccgttgaccgcgccggcgaaagccgccagcttcgcgccctgcacggtacgaaccgttccctgttgaacaacatggtcatcggtgtttccgaaggcttcgtcaagaaccttgaaatcgtcggcgtcggtttccgtgccgccgtcaagggcaacattctggatctgaacctgggcaagtcccatccgatcaaccaggtaatcccggaaggtctcaaggtaaccgtgactgaaaacacgaaagtgacggtcgaaggcatcgacaagcaggtcgtaggccagtttgccgctgaagtccgtgcgtactatcccccggaaccctacaagggcaagggtgtgcgtttcgtcggtgaagttatccgccgcaaggaaggcaagagcgtcggtaagtaattcaggtaataactattacaacatatttatacacgatgagtactatcaatcgcaaagccatccgcgccaaggttcgccgccgcatccgcagaaaggtttccggaacggcttcccgtccccgcctggctgtctatttctccaaccgccacgtctatgcccagatcatcgacgatacggtgggcaggactatctgctccgcttccacggccgatgcttccatcgccgatccttccaaactcgccaactgcgctaccgctaccaaggtgggcaatctgatcggcgaacgcgcgaaggccgccaatgtcactgaagtcgttttcgaccgcggtggattcaagttctgcggcaaggtgaaggccctggccgatgccgcccgcgaaactggtttgaaattctaattgaaagattccttaaatgaataacgaaacggaaaacactgctcctgctacggaagccgccgctcccgctcaagcgcagcaacccgcaacgggcggccgcggaccccgcggaccccgccgtgacggccagaatggccgcggaccccgtggcccccgccgtgacggacgccgtgggcctcaggctgaagctcccgtggaagaaggcccccagctcgctgaaaaggttgtgttcatcaaccgttgcgccaaggtcgtcaagggtggccgccgcttctccttctccgccctcgtcgtgagcggagacatggaaggccgcgtaggcttcggcttcggcaaggccaatgaagtggcagacgccatccgcaaggctacggaagccgccaagcgccagcttcgcccggtctccatcgccaacggcacgattccgcatgaagtctactccgaattcggcggcggcaaggtgctcctgaagcccgcctcccccggtaccggcctgattgccggcaacaccatccgcgccgtgctggaagcagcgggcgtgcgtgacattgttgccaaatccctcggttcctccaaccacgccaacgtggtgaaggctaccctgcaggctctcgcttccctgcgcacgagcgaccaggttcttgccgaccgcggcaagaagaaggaaaaggccatctaatctgatccggaggcggcagcccggcgccgccgcctccaagaaatccaaccattgtaaataacatgttacagcttcatacgattaagcccaatcccggagccaagcaccgcaagaagcgcctcggcaacggggaaagctccggtctcggcaagacctgcggcaaaggcaacaaaggccagaaggcccgttccggcggcacgatccggccgggttttgaaggcggccagatgccccttcaccgccgtctgcccaagaaggggttcaacaacacccgcttccaggataaaatccttatcgtcaacctctcccagcttgaacgcgtgtttgaagcgggtgctacggttgatgaaaacaccctgcgtgcggccaagctcgtccaaggtccctgcgatgccgtgaagcttcttggcaacggcaccctgaccaagaacctgaacgtagtcgtggacttcgtgagcgccagcgcccgcgagaaggtgacccaggccggtggcaccgtcaccgtgcttagcgaagcctaatcacatttggcgaaccgggtcatgcagcttgacccggttcgcatcattgtgtttactgttgcggttcccatggatgccccgggtgcaaaccgccgcgacatgcaagccaagctgcgcgccaacttttatattacaggaccatgatatccgcatttgcaaactccatgaaagtaccggagctcaggcgccggattttgttcacactggcgatgattgtcgtcgtccgcctgggggtacagattcccctgccgggcattgacgtcatggagctgcagaaagtgattgaagcctccgcgaacgccagcggtcccggagcgggtctggctaccgtgctgaccattttctccggcggcggcctccagcagtgcggcatttttgctttgggcatcatgccctacatttccgcttccatcatgacccagctcctttccgcggtggttccccagtgggccaagatggtgcgggaagaaggcggccgccagaaaatgaccaagtggacgcgcgccatcgccatcgtcattgcccttgtgcagggctggttcctggttggcacgctagaacacccggaacgcctgcaggccgtgggtctcaacattcctgcggactgccagcttgtcattgaccccggcatccagttcgccctcatgacggtgctcattatggtggcgggcaccatgttcctgatgtggataggcgaccagattacggaacgcggcgtcggcaacggcgtttccctcatcatttccgtcaacattattcacgcccttccgggagcagtcaccctggcctggaaaaccctggtgtacaaggacggcgcggttgtccccatgggtgccatgctgctcgtggccctgattgccttcctgattgtcgtggtggcgctcgtcgtgacggtgacgcaggcccagcggcgcattcccgtgcagtacgccaagcgggtcatgggcaataaaatgttcaacggtgccacgcagtacctgcctctcaagcttaactactccggcgtgatgcccgtcattttcgctacggccatcctctcccttccgcaggttctcttctcccagatcgcccactacaacactacgctgcagtggatcgcgaccaagatgaatgactggctgaatcccgcttcttccggctattacattatttccggcctcatgattttcttcttctcctacttctgggtggcgaccatgttccagccctcccagatcgcggaagacctgaagcgcaatggcggctatattcccggcatccgtcccggcccccccaccgccctcttcctggaccagaccatgcaaaggctgacctttgccgggtccgcattcctgaccctcatttacttcctgccttccctgctgaatatcgggggcaatatcccctacctggttacccagttcttcggaggcaccagccttctcattctggtgggcgtactgcttgacatgatgcgccaggtggaaacgacccttctttcccgcaattacgacggcttcctgaaaaaaggcaagctcaagggcaaatacgggcacatccaaggtaccggcgccgccgcgggcagccgcaccgttaccgtcatgtggattgttatcgccctgcttgtgctggccggagccatcgcctacaacgccatgcagtaagcccccttttttactgaaagtaaagatatgaaggaactcaagcatttcattctggttggggctcccgcatccggcaaagggacccagggccggtttttggctgataccttcggcctccactccctgagcaccggctccctgttgcggagggaagtggaatcctgcacggaactgggccggaaagccttgagctatatggacagggccatgctggttccggacgaaattgtcaacgacatggtgcgcggctggctgtcggagatggaccatggcgcgtggctgctggacggctatccccgcacggttgcgcaggcggaagcgctggaccattttctaaaccagcggggaacttccgtggatgtagtcgtctggatggatgtgtccagggaactcattgaacagcgcatcatgcgccgccgggaatgttccacatgcggttacgtggtgcagacgccggaagaggaatgttccaagtgcggagggaaaatggtttcccgcaaggatgacaacatggaagctttcgcccgccgctggaaggattttgaagccatgacgctgcccgtagccaggtactacgaggcccgcggcctggtcgttaaaatgacggtgtccgaagaacgggaacctgccgatgtttcccgggatctggcccgcaagctggaagagtaccggcaatagaaagaataatcccatggcagaacgaatccacatcaagtctcccggcgaggtagccaagatgcagaaagccggggctgtaacggcagaaatcttgatggagatcggtgccgaagtccaggtgggacgcaccacgcgggaaatagatgatatcgcgcgtgaaatttttaaaaagcacaaggtaggcaattccttttaccggtaccgcgggtttcccggccagctctgcatttccatcaatgaagaggtggtgcacggcagcggcggcccccgccgcatccagaacggggacattgtgagcctggacgtgggcgccattgtggacggctggcatggagacaacgccatgaccgttccggtgggcatggtggatccggaaaaactgcggctgctggccgtgacggaggaatccctgttccgcgccattgaactggtaaggccgggcgccttgctggcggacgtctgcgcggcggtggagggtttcgtgcgtccccgcggttttactgtggttcgggattttgtggggcacggcataggccgccacctgcatgaagaaccccagattcccaattaccgcccccattacaagcttccgcgcctgaaaaaggggatggccctggccattgagccgatggtgaatgcgggcaggccttccgttaaaattctggatgacggctggacggtcgtcacggcggacggcaagccttccgcccactttgagcacacggttatcgtaacggacggcgcgcccctgattgtgacggaccgcccccgcatcgcgttgccggagcagctcggcattgctcctttgtaacttcagcctctccagggaatgacgccgccggaagcctccgttcccgtgattctggagaagaccgccgcccgccggatggtgtgggtggatgtggcccgcgtggccgcctgcatcctgattattgcgaatcacatggctttctattcggcggagctgtaccggtggatatgggcggagttcctggcggcgcgcacgcccttttttctgctggcggcgggctattttgtgggaagagggtcttttggccctctggatggcgggagccttttcctctggcggcggagctggtttcttcttcgtccgtacctggtgtggggactggctgcggccgttctgatcggctggtcccccctgcacgaatattacgcgtcctaccggcctatgtatgaatggctgggaggggaaaagggagccgggttctggcctgctctcgcggcgttcggccgctgcctgggcattgccgggcatccggtggacgctcccatgtggtttctgcgcgatatcatcatctataccgctgcggccccccttctttaccgtttgggggactatctgctctgggcgggcatggtcatgctgtccctgaactattttgcgctggatctggcggatcatgattatcccctcgccaacagcctgggatttttcctgctgggaatgtatgtttcccagtattccctctcgttcctgacggaatccgtgcgccggtacgcggtgcccttcctggtcgccacgcttgcgcttacctggtggctggcaggccaccgggaccagcacaactccatgctcatcgccctgggcatgctggggctgatgtccctggccattctgttcacggaatggtttccgcgcgctgccaggtgggtggcggagctggctccggcatgttttttcattttcggaacgcattacatcgtcatcatcctgctgcgtgaaagcggctggattacatggaagggggcggcctgggacatgctctggctctttctggttccggtcattttcgccgtgctggcggggctttttttctgcatgaaaagatttgccccgcggctggttcccctgctgggggcctatgggaaataaccgtcttgaagagccgttccgccgggacgggaagggagccgcgcttatctcttgccgtcaaaaggcaaattctttattctttcctttgctggaaggggcggaagcggcttttttgtcacgttgccgttcttgctccacggccgggaaacaatacatggtatggcaatgattcaaggtgagcaggttcaggattcggaattatcaactcaggcggtgatctatctgggcccgagctccatgagcctgatggtggctgaggctgtccgggacaggattcgcctgctggatttccttcagcagcccgttccgatggcgcgtgacattttccggttccaccgcatttcccggcataccatggaccgctgcgtgcaaatcatcggcgactatctggaaattctcaaggaatacggagccggcagcaagctttccgtccggttcatgatttccaacatcatttccgaggcggataatgtggacgtgttcgtgaaccgcatgcacgtggcccacggcttgcgggggcgccgcattgacgacggcaagatgacgcgcctcatttacgtgaaggtgcaggaggctctggcccagtatccggggttcagcaagaaaaaagtgcttgtggtccatacgggaccgggcaatacccgcgtgcttctgttccagaaggggcgcatcgtgcgttattcctgctacaggctgggaacgcaccgcacgggggaggccgtcggggaaatcgagtacggagacgatgtggcggagctttccattctgcgggagcacatgcgcgggcaggtggaccagatttgcctggattacgggggcgtgaagggcctggcgggccttatcgtcatcggccaggaaatgcagcagctccgggaccgcctggcccccacgccggaaggcaaggtggcgtgttcctccctggcggcggaggcggagcggatgtcccgcaccactctggaacagcgcatgaatgtttacggtgcggattttgccggggtggactccctgctacccgccgttttgatgacggaaatgattgcccgcagcctgaacctggatgacgtcatcattcccgcgagcggttatgacgaggagttttcaagcagcctgatacgtgcggaacagcatccgggggatctggaggcggaggttctccatttcgccgggattctggcggacaggtacaaggcggacaaagggcaccgcgagcatgtggcgcgcctgtgcatggaaatgtttgaccagcttcaggacctgcaccgcctttccgaacatgaccggctgctgctggaagtggcctccattctgcatgaggttgggtctttcatcaaccagcagaaccaccagctccattcccagtatatcattctcaacagtgaaatcttcggcctttcccgggatgatgtggaaacgatcgccctgctggcccgctaccaccggcatgaggttcccgccaattccgatcccatgtacggggagctggaattgagggaccgcatgcgcgtagccaagatggccgccatcctacgcgtggcggatgccctggaacgcggccatgcccagcgcgtgaacggcgtccgggcgcacatccgcgggcgcatgctggagctggagcttcagggcgtgcgtgaaaccgccgtggaagacctggccctgcggctgaagggcgacctgtttgcggatatcttcggttatgacgtcgtgctggcgccccagcggtaggctgattaaaaaaacttccattttccatttttcccatgtctgacgaatatatcaacagagaactttcctggctggaattcaaccagcgtgtgctggaccaggccgtaagaacggatcttcccctcctggaacgcctgaagtttctggctattaccgcctccaacctggatgagtttttcatggtgcgcgtgggcggccttcagatgctgcggcattccggttcccgcgtgaaggatatttccgggctgacgcccacccgccagctgaaagccatccgctcccgcgtgggccgcatgattgaggaccaataccgcctgttccatgaggaaattctgccgtggatggaaatcaacggcatcaatcccctggcgatggaggatctcagcacttcccagaaactgacgctggagcagtatttcaacaaccagatattcccgcttctgacgccgctggacatggatgctccggaagctcccgcgctgccatccctcaagctgctgatgggcgtggaactgcgcgacaatgagaccggggaggtgcgctccgccgtggtggcccttccggacggcctgccgcggcgcgttcccgtcccttccgcggaggcggagcgctacgtgatgctggaggacctggtccgggagtgcatcggcaccgtttttcccggtgagaccgttctttccgcagcggtgttccgcgtcacgcgcaatggggacattgccgtgcaggaggaagacgccctagacctggcggatgagatggaggaagtgctcgtagcccggaaattttccgaatgcgtgaggctggaagtagagtcctccgcgcccgcccccctgcatgacaagatcatgcggattgtaggcgccgggaaggaggagacttatgacctcaagggtcccctgatgctttccgacttcatggaaatggcttttgcccccggcaatgaccagttgaaggtggagcagtggtccccgcagccgtccccttccgtgaatccggccgtcagcatttttgaaaacattgccggcggggacattctgctcaatcatccctatgaaagttttgaacccgtcctgcgcctggtggaggaggcagcggaagattcggacgtcattgccatcaagcaggtgctgtaccgtaccgccaggaactcccgcatcgtggccgccctgaaaaaagcggcggagagcggcaagcaggtgacggcgctggtggagctgaaagcccgttttgacgaagcccgcaatctggaaaaggcggaggagcttcagcgttccggcgtgcaggttgtttacggcgtcaaggggttgaagacccatgccaagatttgcctggtggtgcgccgggaacagggcatgctgcggcgttactgccatttcggcacggggaactacaatgagaccactgccaagatttacacggatatttcctaccttacctgcgacgaccagctgggagcggacgcttcccagttcttcaattccgtgacggggcgcaccaagctcatgcgcttccgcaagctgtatccctccccggtgttgatgaaggcgcgccttattgaacttattgaaggggaagcggaacgcgcgcggcagggggaacccgcccgcatttccgccaagatgaacagcctccaggacgtggaaatcattgacgccctgtacagggccgcggacgccggggtggacattgaactgaacgtgcgcggcatttgctgcctgaaaacgggcccccggcccaacggcaaggtaatccgcgtggtcagtatcgtggacaggtatctggagcacgcgcgcattttctttttccaccacggcggcaaccaccagcttttcatcgccagtgcggactggatgacccggaatctggataaaagggtggagcttatggtgcccgtcaccaacgggaagctggcgcgccgcctgaaatccattctggacgcctgcttcagggacaatgtccaggcctgcaatattctgccggacggcacttccgaacatgtcgtccggaaaaagggtcagaaagccttccgtttgcagcagtacctgaccaaggaggcgcgccgcctggccaaggacaaggaacgggaacgccagcagatgctggaaccgcacacgccgcattaaaggcgctcgtcacgggcgtttgaaggtccgccgggaacagtctccggagtacgccggttttccggccgtctgcggaggctgcccatgtttcccggagaggggggaagccggttacggttttctgccgtcaagaatggacagcaattttttcagccacctgatcttgtcccggcgtttccggaaaatatggccccgggagaagaacagtttccattgctggccgcggatatggcgctggaggagcggggccagcccctgggaaatcgcatccagttcctcccggaacacgggaagcctctttgcttccggccaccagaaaaaggagtacaggatccagtggaactgccccatggttccgggggtgtcagggagccgccatggtttttccgggcctaccatgtgcagcagtttccatgaacgcccgcaggatatggtcggaacgttttcaaattcggttccgcgcaggagccgtgttttttcttcatcccaggtccaggacaggaattggaagttccattccggaggcagcgtcgtcatgtctccgtgcagggcgatatttaagatgtcctggtccggataggggaagggttccgggcggctccgaagctgttggagcagccggtgttccaggttacggcggcgcatctggtccagatccagcaccaggacgccggaattgcagtaggaaaggggggaggaaaggtagttgcccatatattccagatggggatgcatcgttcctttttcaatgctccagagggccaggccgtctccggccgccgctacggaagctccccgcaaatcggaaaaatacagttcggctacgtctccggccagcaggacatctgcgtccagataaacgatcctgccgtactgcgggaacaggctgccggccatcaggcgggcatacgcaaggggggagtagcggtccttgttgccgttttgaaagagatggcggaattcttccggaagttgcaggaaagaaagggaaacctgcggaaagggggcggcaacctggttcagctcctgtattattcgcgcgtccattccgtcgtgaacgatgtgaatgtcataaaagcgtccggaactggcgtgaaggcaaagggtgtgaatggctacgcccaggggcaggccccagccgccggtggcggaaaacatgacggggatgcgtgatttctccggggatgcgggaacgggcggggttgtcatggaatcggggaatttcatgggaagggtcttgaagaaggggctgcgggaaggaataggccggggagggaaagagcatggaggctccgttcaggccggaaaagggatgtctgttatttgaagaagggggcgtctgaagtctttaaatgccgggaccgggatttttgcggggggtaaccgtttttccccgcatggaaaataatttggcggttttcgttcatttgtccgtttcatggttcggggcggcttttcgggcattcctgttcctttggcggttcctgccgggcggagagaaggggcaggagcagtccggctgttttccctgcctggtacgcgcggtccggaggggagaaatggaagggatctatatatctgcgcccctgcatgaagtcatggtggtctgaaagaaccgcgccgggcagggaagatgccgcctcgcggacaatggcattaaaggcggtgatgattttctctttttcttcattcagcgtgccgtccggcccatccatgatggacgtactggttgccaggatgaggaaacggcagcgcttgctgagctgggagacgaatgccatgtaatttttgcggaagtcatccacggaaatggcggagactttattggtgacgtgggaaccgaaggaaacaatgacggcttcgtatccggcggagggaaaatatcctgcaagggtggggagatagtccggatctccgggaatcagcgtggaggagaacaagtcaatgtcttcctgaagttctgaggcaaggggccgccacaaatgccgcatgacggaaccgccaatgagcagtatgcgcgcctgccctttttctgaatgaatggccgtaatccagtcggtttcctcacggtaatggggaggggccgccaatgccctccagcgggcaagcatgcgttccttccggcgttttcttcttttctccagcaggcggtgtattttcccggaacgccttctcacccacgtttggccgaaaggcagccggtggaggatctgttttcccagattccggtaagcttccgggaaatcttcttccccggagccgggcagggggcggcattgcagcatatcgccgcaaaagtcaatgaatggaaggttcagcttgcctgccagcgtgcgaagaagggcgttccaggcttcaaggacgcccggtttttccgcgtaggggtgccgggcgctgccgtagtcggagggcggggatgacaggaggatcaggcggcgcgtctgtttccgcagaaaggcgaaaagcctgcaaagcatatcttcggcgctttccatgggcccgcccccttccgggggcttttccatgagcctgccgttggccggggaaagatgcaggggcggccacatgaaaagaatgatgctgtagcgggcgccggaaaggctgtgctccatttgccgccacaggcggggatggttgagcgggaaattgaagatgagcgtgtcggcggccagtctggacgatttcagatgaccatggttttttgccagagcggaactgccgatcaccagcattctgtcattgccgggcaggaggcggtcgtgttgctggtaggaatagatgaacacgggaaaaacagcagttacagggatgatcgggggagcttctttgcagaataaagagtgtatccgaggatttggagcgtgtctattccgtttttggaaaacctcagccggaacattttccttctggcggtcttgaacttccagaagcattgaaggaggcgcaggtaaatccaccgtccggccagggcggcctcaagataagccctctgttccctgggcatcccgcaaacgtgttcggaagtgatgtccgcctcccgccagagttccgcccaatgcctgagccgcccggccggcatttcattgtccggaaaaagcagggggacaatataattcatgtaggccgtgcggttgctgcccagaaccccttcccggagtttttccctggtgagcatctcgaatacggcgtaataacttgcgggccgggtttccgctttccggttgcgagaagaaacggattgggggccgcccagcccgtagtggtagagtttttcagaggtgagggcgacgctgcggcagcgggcgatggcccgggaaacgtaaagggtgtcttctccgctggtgaaggaagaaggcaggcggacttccaggggggcggaacagccggggaggagccgcctgaacaatttgctccagacgacgccggtgatcctgtcttccagaaagagcctgaatatttctcctttctccgtaaagacgccgtcgcaggcggtgttttcaatatgaaggagttttttctcagccattccgcgcgattctccgctttcagccggaaggaagggggaataggaacattggaccatgtccgccccgctttcttccgcgagccggtagagccgttcgtacatgtccggctcaacgtagtcatccggatccgcaaaacccaggtaaggcgccgcagctgccctgattcccgcgttacgggcttccgccctgccggaattttcctgtgtaatcaggcggaaacgactgtctccggaagcatatttccggacgatgcctccggacccgtcggttgaaccgtcgtccacgcagatgatttccaggtcgcggagggtttgtgccgccaggctgtccagacagcgcggaagaagggactccatgttgtagatggggacgatgacggaaatgaggggtgaggggagaggcatggtctgctgtataggaaacggggttatatccggagccatgagccggggatgagtgcgtcatccgtatggtaccggtcgccttcctccctgttgaaccagatgcgcggcgcgatgacgattttctccgcgtgttcgttgagccaggccgcccaccaggagaaagtgctgttggcgatgatgtggtggcggcagtttcgcatcagttccagatcgaagtagccggtgccgccgtcattgatatccacatggacatggggcagggcgggcctcaggttttgccgggcccattctatgtcgtccgagaagatgaagtaacgcagggattcctgcggagcgcctgccgcccgcagccttccttccatttcagccatgctccggaggtagtattccagaggcggcggagaaaggtaggggttggagaggtaatccgttctgcggatgtgcagggaaatggagcagcatgaacggatatcttcaagaatgcgggcgttttccggagtcaggggagttttcagacggaattccctgcaaagctgttcccggcagtggaggaagtattgttccgtctgaaaatatcccttgaaataggtatggcggcggggaggagccgcgagaccgggatcgaacccgtgccgtttttcctcccggaaatgaggatatttgggagcggcgaacagggaacgcaggcaggcgggaatacgggacttgcggaaagcccaggggggagggcctccttcaatgggaagggaaacccggaagtgatggagttcgcagaccctcttatcatcatgttcatatgatgaggtttccagtcttgcttttcccccttgccgggagagcgcgaagaggaaggcgtattggaacagctggtttcccagccctccgaaaagacgcatgactattatttttccttttgccatgttcaagcaggggaaggggttaaaacgtgatattcctgcgtatttcctccagctgttcgcgtacttgccgcagctgtgccctgccattcctcctccatgaggggacagggcagaaatggaggagcttccggcggattccggtgtttttgccggccctccggagccttcttccgaaatctgaaaagccggaggattgcaacaacaggcggaaaggaagatgcagggaggccctccggcactcggcggccgtgcaatgggcgttcaggaagtcccggatgatgctgtaaagtatttcctgctccggcggggagaaaggcatgccaagcagcctcagttcaaatggttcatgctcaataaagcggacgagatggccggcttttcttttccagagatggcgttgttcataaaactcttcaatcagggaaagccaccgggggatcatgggcaggatgtcggcggttcttttccgtatctggtggtggttgccctgttcatgctggcggtaatggtaaacggcctccggacagaaggaaattttttctgtcagcgcgagcacgaaatgcgagaagaggccgtcttcacaggggtgaatgccttccgggaattccagattgtttttcaaggggaactcccggcgcagaaatatgccgcaggtgggcagggcggggattttgtccggcggaaacctgtcgcagaacagctttcccgctacggtcaaatcgcttgctccgcggtccgaggcgtccagaagatgtttgagaaaggccgcgtcgatgaaatcgtcaccgtcaacaaaacacaaatagcgcccggaagcgtgccgcatgcccagattgcgggcggaggaaacgcccctgttttcctgttcgaggcagaggattcttgagtcctcctctgaaaaacgccgggcgatttcccccgatgagtcggaggacccgtcgttgacgatgatgcattcccactccgcaagggtttgccggcggatgctgctgatgcactcttcaagatattgttcctgattgtaaacgggaacgatgacggaaacctggggctgtggcgggcgggttcgggtcatgggcgggcctgttgaggttcggagggggagcatgcggcaagggcccgctccagattggaacgggattccctgtcaatatccctgcccaattggagaagcgcctgctgcatttctgcgtattcctcttccgtttgcctgatggcgcggagcatggcgccgccaagcgtttcttccctgtaaaggagtgcgttcctgtcgttgaagccgtagaaggaagcgaatttctcatggatgaccgggattttcgcgaatccgtaaacaagctgggcggaaccggtgacgccggtggtaatgtagcggttatgcgccggattgccgggatcaagcaggggcaggaaatagtccgcccgcctcatggcctcgtacatggcggggaagtcgagctttccggccacatgcaggaaggggcgcagatggccggggatttttcccagctctccttcccccacgatgatgacggaaaagttcctgtacccttcattgcagacggtttccagcgcctcaaccaggagttcgtggtttttccgctgtgcggagagggaccctacggtgatgaacacgggttcgcggttccggggcgcaggcgggatttccccgaaaaagtgcggattaaccatcatgcccctgggaaaggagcccagcgtcagcagccgtccctggcggtcaagttcttcttccccgaaccgggggatatcctttaattcatgttcgacggccagaagattggcgaatttgtcaagccccgtcatgtgaaggaaacttgcccaacccggaatgtcataaaaggcggatgttgataccaggatggcttcgtaccgggtgaggacgcgcgctttggccaggcgcttccatgaagtgcacatggccgtgaaaatatggatatcgccttccttgaaacaacacaggggggattgcctggccaggctgtgatgcatcaggacatcaacgcggtatcccatgtcgagcaggtggcggcagaaaccggggatgacttccccgtggcaatagttgggttccagaataaggatggtacggccggccactggatgcctgcgccatgcgcgcatgcttcggcgggcgtcccggtcatagtcggacaggaaatcgcgcaggaaagtgcgccattttttacgcaggttccgaaacggaatacacatggtcagcaatcggagcatgactgtctgcgtatgtgtcattggtttcatggtgaaaaattgcaggaaatataatgaatatcgcctgacgcggatgatgaatggcccttgttaccgttccgggcggtttttcccccgccgggtaaaaaagaatacgttgtgtgacgagggctgaatacttaataaattcatactgaaaagcaatatcaaaaaaactccttggcgcatgatgccggagtattcctgacggtttgaattttccgccgtattgcagccgtaccacagccctccgtttccgttattcccgggaacttccttcgggaggcagcctttgcatttctttccggaaacagtttccctcttccggttgttccgtttttcaacagatgacgttgctgttttttcttgatgtgaattttcaatccggataaaaaaggacgcttccgccatgagcgtatccgtttccatcattgttccctgttataatgttgccgcttatttggaccagtgtatggaaagcctggccggccagagcatggaagatatcgaaatcatttgcgtcaatgacggttcttccgaccatacggcggagatattgcgcgaatggcgggacagggacggccgcgtccgggtaattgaccggaaaaacagcggtgtttccgcagcgaggaacagcggcatggaagcggctgcgggaaagtatatcggctttgtagacccggacgacgtggtggatcggaatatgttccggcgcctgtttgatgcggccgtggaaaaagatgcggacgtagcggtgtgcggataccatgagttctgcgaccgcggaggcatggatatgcctgaaagcggctggtcgccgtcagccgggtttttcccggaagaaaaagcggagcggttccggcgggggacgccctggagccagtgcgcaggaacggtgtggaataagctgatccgcagggagctgctggaagaaaacggtgtgcgtttcgttcccggattgcgccagggggaggatttgtatttctgtctgatgctgttgactgttgctccgcggctcctgatccttcccgaccgtttgtaccattaccggagggaacgccccggttccgcctcctgcgggcgggatccccgcctgggggatttccgcatggatttgatgggcatggaatctctggcgcgtttctggggggagcgggggctgcttgattcacccgccgccttcggtctggtggactactgcatggagttgatgcgcaggcatttcatcatgaaagagggagcttttttcaaagcgtctccggaagaccgggaagttctgctttccggctggaaaaagtggctggagctggtgggcgcggagaacgtccttcccagtctggaccggtgggaccgggctttttgccgccttctgctggattgccccctccggagcaattttttctctgccctgcattcccgcctgatgtcgtcccgcaaggggcgccggggggcttactataccctgaaaaggcacctgatgaagtgaaaagggggagattcccccccctttccctgctgttccggcgccgcatggggttgcggaaaggcggaatgcctgccggcatcctacaggcccgtgtagcacatctgctctttgagctgggccacctggaggtcttcccccagatattccccgatggagtagccgaagagcatggcggcgccggggccgttggcggtgagcatgttgccgtccagcaccacattttcatctttcacaatatgggcgccggcttcgttgagttcccggtaaacgtcctgggccgggtaggccgtgacgttcctgtccctgaccaggcccgctttggccagcacgatgggggcggcgcagatggcggccaccagcttgcccgcttcatgcatttttttgaccagatggatgacttccggcgtgtcgcggagtacccaggagcccgcgccgccgggcaggatcagggcgtccagcttgtcagcatggagtttatccagcatggtgtccgtgctgacggttacttcatgggtgctgaccaccttgtcggactggacgccggcaagcactacgtccatgttcaggcgccgcaggatgtccagcggagccatgagttcgatttcttcaaatccgggggcggcaagtatggcgacttttttcatggttggtaagacagggggaggaagaggaacgttcaaggaaaaaagcagcatgttccggtagccctacaggaggagaagaaccgggttttccagcagggttttgaattcggcagcaatgttggaagccttgcattccggcagaatgccggcgttcacgtacagggtgacgggcaggatgagtttggacacggggcgccccgcttcaatgcccgttttcggcgtggtgcctcctatgctgatgatgctgtggggcatttccggcagcacggcgcgctgggctgccacgttcacgccgctgtcgcaaagaaggatgttgggcgcgacgctgcccgcggggagcgggcctgccgcaggggcggccaggcgttccatggcgatgttgtaaatcgtcttgccggaggcgttttcaatgaagacgtatttttcccccttgtccagcaccatgagcagttccgcggcggcgtctccggccagccattccggctcgctggcgcatgctttcaccgccgcgcgcaccacgtagtcaaagaggctgtagcggccgccgatgagtttttcgcactggacggcgatgggcgtgctgatggcggccaggtaagccatgttcgcctccagggaatacaggtaaaaattgtctacgcgcgtggcgtggcgcgtgtcccggggcgccagcggggtctgcacccggcgggcggggccgtccgcggggcgcagggcggcccgtacatccgcggccatgattttgccccgggggccggtgccgcgcagcgtggcggggttcaggccggcttccgccgccagcctggcggccagcgggctgcatattgcggacgggcgcggggggcagccgcagacggctgcgccgaattccggctgaagcagcgcaatgggcgctcccgccgcggcggaacctccctccggcaccaggatttccgtcagggtgccgtcctcgcaggcctggagctccacatgggccttgtccgtctcaatatcggccagatggtcgccgacttttacaaagtcccctgtttttttgaaccatctcaggacggtgccttcgtgcatggagtcggacaggcggggcatttcaatggtaatagccatggaggtgaatgttgaaatatggtaaaaaggaggaaggcgcgccggaaggggcgggacgtctccttccggcgcgcggaaacgcggttacgcgctgtatttttccacgccgtcgatgaataccttgcaggtattgaagtcatcgtccagcagaaccatgtccgccgtgaagccgggggcgattttgcccaggccttccaggcccagggactgcgcctggttccaggaggtggctttcaccaggtcgctgaggggtttcccggtcaggcggtgcacgtttttcaggccgtgggcgtatttgagggtgctgccggccagggcgccggattcctgcagacgggccacgccgtccttcacgatgatgggtaggccgcccaggtctccggggccgtccggcatccaggagcaggccagggagtccgtaatcatcagcatctggtcagaatccttgtttttgaacacggttttgagcatgtccgcgcagaggtggatggtgtcgcagatgatttcaatcttgatttccctgtccagcaggccggaccccaccaggccgatttcacggtggtgcaggggggacatctggttgcaatagtgggtcaggtgcgccagccccgcggacttcgccctgttgaagtcctcatgggtggcggcgctgtgcccggcggagcagcggatgccgttggccgtggctttctcaatgaattcaatggctccgggcatttccggcgccagggagaccagcagcaccttggcgatggagttcaggttggctacttcatcgtaatccggctggcggacaaaggcgggattctgcgcgccgcagcatttggggttgatgaacggcccttccaggtggacgccgggagtcttggcgaattcctggttcttcatgtattccgccacggaggcgcatacgtcttccagcaccttgggggacagggtgagggtggtcggcagccaggaagtgacgccttccttcattttgcattccgcaatggtgcggaggctttccagcttggcgtcgcaggtgtcgcagccgccggcgccgtggctgtggatgtcaatgaagccgggaaggagcatgcggccttccgcatccacgaccttgtctgcggcgggaagttcgctcccggcgggatagacggcggtaatggttttgccttccatttccacggcagccccgggcatatcaatgccgggggagatgatgcgtgcgtttttaatgagtgtcttcataaaaatgaatggttgttggatggatgtttatcgtcgtttttctccgttcgtccgcgtcttcccgcctggcctccgcttcctgcggaaaaccgggaatgggcggcggcgcaccggagatcgttcatgccgctggcagcttcctggttatctggcggcgtccagggccttgttccaccgggctacgcgggtggcttccgctttcagcacggcagccgcggcgttcttgtccagaatgcggatgtccttgattttgtccccccggacaatggagttgacgacgtcctgccctttcagcaccttcccgaagaccgtatggcggccgtccagatggggcgtggccacatgggtgatgaaaaattgggaaccgttggtgccggggcccgcgttcgccatggaaagcacgccggggccgtcatgcctgaggtccggggaaaactcgtcttcaaaactgtagccggggcctcccatgcccgtgccggtgggatcgccgccctggatcatgaaattcggaatcacgcggtggaaggtgatgcccttgtagtaccctctgctggcgaggttcaggaagttggctacggtgacgggcgccttggaggggtaaagggccagttcaatatcccctttggtagtggagatgacgacattgacgtccttgaggccggctgtggattccgcggaggctctgaagcacgccagggcgcacagggaacacaacagaagggtgagatattttttcatggctttttgttttcccccctatgttgcccgaataaaagcagggttgcaagtaaatcgcgcgccctgacgggagaatggcgcggggcgcgccaatgcgggaaggtttttctctgaagagggatttttaaggatgggcgtccggttgccggcccaggactaccttgagccggaagccgcgcgggaaaaacggaagaccgcccacgccatgaagaggctgaggattcccatgacgacgaattgccaggagggggggatgaccagcatcatggcgtattggaacccgacggccagcaacccgagcgcgcagtccaccaggttgccggcggcaatcatgtccccgcgtttgtcattgtccgcccggtcctggaaaaaggcattcagaggcaccaggaacagggcggcggaaatgcccgccgccatcagcagggcattaaagaccggggaagccatggagactgcggccagggccgcgcagctagccgccatcagcacgcctcccgccacggaaacattcatccggatgtggcggcggcaaatcacggaggcgagaatgccccccagcaccgttcccccgctcatccaggccatcagcacggctcccacggagctgaagtcatccccgccaccggagatttccttggccatctggatggtcatcagcatgaccgtgccgccgaagaaccagaaatagccgatgcccatctcgctgacgcgcagattgcggtttttccacagcttgcccagctggtggaagtgttcgtaaaacagggaccaggagaaggggcggccccccccgggagcgtaccggggcaggcggaagctggaggccgccaccggaacggccaggagcagaaacaccaggcatgggaaagaggcggcataccatccgtcattgatgccggagggtttcagccatgcgtcaaaccactggaagaagccctcccccagccagcggtgccagatggtatccgtggaaggctccagcaggtagcggaaccagatgaagacgccgatctgcccgatgagcaggctgaggatggaagccatttccacgatgccgctggcgaaccccatgcgggaagtccccacgatgtccttgacgattccctttttggccgggctgaagacggtggcctgcacggcaaagacgcagaaccacaggatggccccgttcagattgtggacgcgcaggctccagtacatgcccgccagcacgcatatctggagcagggccatgaattggatgatgcgcgccttgcagaaacggtccgaaagccagccgacgaatggggagaacaggatgaagggcagcacgataatggcccccagcggatattccaggtccccctctgcgccatacagccagacgcccaggggaatcagcaggaattgagcccctttttcattaaaggagttctgcgcctgaatcagcacgagccgccagaaagctccccatggaactttgcgggcgtgtcctggcgtgtgggcgctggaattcatgaagttacaggctgggctcctccgctttttccaggccggagccgcggaacaggcacagcacgccgatgacggcggtcaacagggcgctggcaatcagggaggcttcttcactgaaaccgcacatttccgggctggagaacagatattggaatactaccaggctcaggaaggcggcgggggccgccgccggccagcagcagcgttttttgctgcgcaggtaaatggaaacggcccagagcgtggcggcggccagcagctggttggcccagccgaagtactgccagatgacggcatagtccatgctgctgacggcaatggccgcggcgaagagagggatggcgatcatcaggcggcggctcagctgttcctggctcagcttgaagcagtccgcaatcatcaggcgcgtgacccgcagggcgccgtcccccgtgctgatggggaggatgaccacgccgatcatgaccaggatggagccgacgctccccatccaggattcggaaatcgtctgaatggccagcgccggagcctttccgttggcggtagcccctcccagggcttccggagagccgtagaaggttagtgcggcggcggcccatatgaaagcgatgatgccttccgtaatcatcgcccctccaaagacgggcagcccttcccgctccgttttcagacaccgcgccatcagcggggactgtgtggcatggaagccgctcacggctccgcaggcgatggtgatgaacatcacggggaaaagcgggaaatccgccggatggcggttatggaaaaagtccagatccggaagcacttccatgcggggcaggtgcatccaggccggcatgaaatccgcaaagggagccaggagcattacgcccagaatgcccatgaccatgatgatcagggcgacggaaaaaagaggatagacctttcccatgatagcctggatgggaagaatggtcgccagaaaataatagccgaagataatccaaacccatgccgaaacgctccagcccgtcatgggggacaggatggcggcgggccccacggcgaagacgacgcccaccagcacgctgaatacgatgcagacggcgcggctgatccactgggcctggctgcccaggtagcgccccaagatttccggcaggttttcccccttgtgccgcagggaaatcatgccggagaagtagtcgtgcgccattccgcccagaatgcagccgaaaacgatccacaaaagcgcggccggcccgtacagcacgcccatgacggcgccgaaaatgggccccagccctgcaatgttcagcaactggatgagaaaaacgcgccagcgcggcataaccacataatccacgccgtccgtacaggccacggcgggagtttgccgggaggcgtccggacggaaaatcctttccagcacccgcccgtaagtgaaataaccggccgccaggaccaatattcccagaatgaaatagcagtaaccgttcatgttggaaaaagggccagccatctcatggacaggctgtccgttcacggaacttaacttttctcccgccttctggcaagccgttagtgaaaggggggaaatagggaacggattccaaatccgaaaagtaaatccacgtctctttattatgcataaataattggtgttgtaaattttatgatggttttaaatcttccgcggcaaagcttctgattataggacgccgctgttcctatatttgtataaacatctcgtttctattgtttagtgttgacttcggatttggaatccgctaaacggaaaaggttgataccattcaaccttccccagttatgaagaaaacattgataatcattgcgtccctggctcttggcgcggcggcttcccaggccgcggtgctgtgtaccactacgtttaaccggaccgggacttccctggattccgtcactgtgagtacggtctccgatgcgggactctccacttccacctcgattgcttcccaggacttcagcaagagttctgcgggcaatgacctgctggcttcaggttctattccggcctccgtattctcccccaattccaatgtgggtaataatcagaataatacatggagcgtttctttcacgtttaccaacgacggttcccaggatatgctgatttcttccattgatctttccatgatagggttcactggagcgggcgccgcgcagaatgccggaggcggtgtggccaataacaattatgttgggggagccgacggcaatctgaacaaacctgtcaatatcacccttggcatgagcgggcaggacgatcagacgctggcctataatggcgccaccagtacaaatacatctacgggatcctgggatggcgttcgtacgggaagctatgaatatggcgatgtgttgttgaaagccggggaatccatgacgttaactgttacggcttccaaaaacgaggcctacggcaacggctgttttatcggtcttacgggaattcagattaatggggaagtggttcccgaacccgccacggcctccctggggcttttggggctggccgcattgatgatgcgccgccgcaggctctaagcatcttttttcaaccgggcccgttccaagaccggatttttggaacgggcccggtgcatggcattctgtaacagaataatgcatggaaagcgaattaagaatccggtgtcaacgtaaaattttaaaaagaaaccactttatccctcctgccttctctgaaaagagaaggcaggaattgcctctttttaaattttaacgatttatacaatttattatcaaaggattatattcttatccagcgtaaaaaacattttcaggattcttaatccggtagagaaaagccgagtttctgttccagaaattcagataatctaaagttgccagaatcatgaagaaaacattccctgtcattgtctccatccttgctcttgctggttccgcccattcggctattgtgtttgattatcaggcaaatcctcaagcaacaacgagcttttaccagcctgaaaccaccggagcttccctgaccagtcagacattcactggggtttcaaaccagaaaacgggttccaactacgttgactcctttttgagtcccaatataaatgtcggcaacgggaatgcgtggagcgtctctttgtcctttaccgtaacggaagccgtcaccgttgattccatagctctgaatctttttacattcagtggtgctaatgcggttcagaatagtgaccggagaggcgcttatacctttaatttgaagctgggtgacaatgttttggctagttgcagcaattctaacctgacttatctgggtacgggtgatgttaatgccggcagttcccaacaggccagcgtgggaacgctggggcaactcggagggtcttccggcatccatgaggaaggaacgctgaaccaggcagtaaccctgtctgccggcaatacttatacccttgagctttccctgaacaggggacaggaaacgcagggttactttgtcggattgggcgccattgaactgaatacgatccctgaaccggcgaccgcctctctcagtattctgggcatggctgcactaatgatgcgccgccgcagacgttgaagcccatgtccctgatacacttgttcaagccgtccgttttttctttgaaactggcggcttgttcattttcagccaacaaaattcggcattttttaacatttaacatcaataaccggtatgattccccaggcagtccgttcttcggcgtgatgtcctccgggtcatcgtttcgtcagccagccatgtttccacactgtttttttaccgttctcctcttttttcttctgttccttgctccagctaggtcggctgatgttgaatatgtctggaggggcgccgattaccagtggggttccctgtccaactggagtgtcggaagcgttgccgcctcttccgcgccaggggccgccgcttccgcctatgaacattggatggtaaccaatggaacggattccgcgggaaggacggatgtcggcggattgggcgcggggggccgctatttgaagggcgtcaggattgcggggcttaacagccagccggaaggcaaaatcccattgttcattaaaaacacgaacaaggatgtatatttgcgcgtggagaagggcggcattactgtggaaaatgccggagaaggaggttattctgcggatttcggggtcgcccagctgcgcgtagccgcggaccaggagtggcatgtggctgaagggcgcagcctgtatgtggggcatgacgatgacgctccgtccgggggattgtattccctgacttcggaaggcgatgttccgcggcgcgtgacagtgacgggtggaggcgccgtgcgcatcggggaagggatgctgctgaacaatatttccggcctcatcggttttgtgctgaacgccggaaagggaattccgacgctggatctggcggaccggggcatgggcaatacggtgacggtggaagacgctgcccgcctggaaggcatgtctttgtaccagggggtcctggtgacgcgggaaaacgcgtccgtgactttttccggcacggaggccaaggcgtccggacaatggaacattggcgcagacacggagttggcgctggaaaatgccacgctggacctgacggaggcgggtgtggacggcgacgtgattctttccggctcttccggcattaccggggataagggaacgctgcgacagacgcttctggatgatgcccgggtgacttatacggacaggaatgtcaaggcgggggaaatccggagcgcaggcagcaatgtgacgataacgctgaataactcctccatgcattttgacggagaaataccggcggtggacctggtggtgcagggcagctgcacgctgggcggcagcggcgccttttcaggaacgattacttatgcgccgggaggcaccctgactgtggatggggatatttccctgcccagttcatccctgacgctggggcgtctccatgtggctacgctggacggcgtgccgcaaaactccgccgtccggccggaaacccctgcccagcaggcaagggaatatgtggttttgtttgattcttcctttgaggatttgatttccgaatggccgggcaggcatacgctgggcgtgcagttccggccggatatgggcgcccccgtcaccgtaaaggaactgcctgaaggggcggtttcatggaattatgatgccgcatccggctggctgacgctgcagacggatgtagcggaaaagccggacatgccggcgcatgtttccggagccaggcccaatattatttttgttctggtggatgacatgggctggggggatatgagcgtcaactggacgcagcaggataaaaacggcaggcaggtgacccgcaggaatgaattcaagacgcctacgctggacacgatggcggcggagggcatgcagctgaggcgccattacagtgcggctccggtatgcgctccggcccgcgcttccctgctgctgggcgttcaccaggggcattcccgggtggtgcgcaacaatacgtttgattaccctatcgagaattcccatacgctgggaacgctgctgaaaagcgcgggttaccatacggcggccatcgggaaatggggcgtgggcggaggcggacagagcggcaaggctctgaccgcggctccccacatgcgcgggtttgattatttttacggaatcatcaagcatttggcggggcattaccattatctgacggcgggttcccaggatatttacgaatataatgaccaggccgcggctccggcatgggagagcgtcagcgcgaaagttccgggcaccgcctatgatacggatttgttcggggcccgcgccaaacagtggattgtggaccaccatgagaaaactcctgcccggcctttcttcctgtatctggctttcccggctccccacggcagtctgtccgctcccgcctgtgcctatccggcggggctgggaagggacggcggcctccagtgggagaaaaaagacggctatgaagcctgcaataccgctgcggacggatggtcgggggtggagggggatttttctccggatacctatatctacccggaacatgaggtttttggaagaacggaatcccgccacgccacgatgatccgccgggtggatgacgtcctgaaggacatgatccagctgcttaaggatttgggcattgatgacaatacgatgattgtcttcacgtccgacaatggcccccataatgaacccggttccggcaattacggcaacggcgcgcaggatcccgcgtatttcatgagctacgggatgatggacggcattaagcgcgattgctgggaaggcggcatgcgtgtgccggccgtggtacgctggcccggtgtggttcccagcggaatcagtttgaatgccagccagttccaggactggatggctacttttgcggacgtggccggagtgcccgtgccgtcccgttgtgacggcgtttccctgctgcctacgctggcaggggtgccggaacgccagaaaacgggcgttatttatgcggaatatgcctatagcgggagcactccgaattacagcgatttccttcagcaacacagggggagagggcggcagcagcagcagattatatttgtggacggcttcaaggggattcggatggggaatgccgcccccactacggattttgaaatctacgatacggaaaaagacccgcaggaagcggcgaatctggcggcatcccgtccggatctgcaggagaagatgaaggcgcaggcgctgcgctcccgccgttcctcccccattgcctccaccagttttgacgccggttatatcgcgcccgtttccgcccccgctggcctgcgggagggaaggctgcgctggcgcgcgtggaaccgctcttttgactgggtgccggatttccggcagctggaggaggggccctgttctacgggagcgacggatgtttccgacgtgctcagcgtcaaggcggggctttccggtcagaagggggtggaattgacgggctatctcagggtgcctgtcaccggggaatatcaattttaccttcagacggattccaatgaaggctccagggcttttgtccatttgcacgatatgcagctcattgatgcggattatgcctatactcccggaacgcaggctgcctccaacgcgcgggaaggcgtttccggcgatgtgcagcccaatgccgttcagacggtgaagcttactgcggggctgcatcccatccgcatcggctatgtggggaaggcggcttcctcctccctttccctgcaatgggaggggccggaaaccagcggcagggaacccattcccgccagcgcgttttcctatgaatacgtgaatcccttcaatctggaaaagacggaggaaacggtaggatgcgccgcctccggtacggggctgaccgtgcagacgcatcttccctggacagtttcctgcgaccagccatgggttacggtttcccccgtttccggttccggaacctcagtgctggatattgccgtggaagcaaacgggctgcaaacggagcgggaagccgttgtcaccgtcgtatgcggcggggagcagaggacattcacgctgcgccaggaagctgctcctgccccggcagggtacgacaagtggaagcaggaccattttgcggatgggacgccggatgagcaaatggccccggatgcctgccccgccggagacggaatttccaatctgatgaaatatgctacgggcatggatcccaaccagccctgcgggagcgtgacgaagctggctgtccgcgaggaagcgggcgggaaatacctcgtgctttcctggtctgtgaatccggaggcgacggatgtgacgttccatgtggaaagttcttccgacctggaggaatgggctgacgaaggggccgtcactccggacggggcctgcggggaattccgcgatacggtcgcgctgggaaaaggctctccggagcgccggtttctgagattaaaggtgacgagatagggaatcaccggtttctctttccgtttcccgatgatgattccttacgggaacagggaccttccggccctgctgccttgccgcccgttacggattttttccggaagcgtgattctgcgtgttccggccctccgctgtcccggcgcatccagcgcggtacggccggggacaccgtgccttagccaggggaagaatattactccccgtcattttccgcatcggcagggggagctttgggcaggttcttgtcaatgtcttccagaaggttgaccaggtcaacgccgcgttgggcggagtcgtccagacggaaggtcaggcgcggcgtattgcgcagcaccacgcgcctggccacggcggactggataaggccgtgacgggagttcagtttttccagcacctgggagggagccattttccctacgacgcccacccatactttcccctctttcagatcgtccgtcacttccacttcaatcacggtgacgattgttccgggaaattcaaaatcccgctgaatggtggtgcctatttcccggcgcaggagttcgtttaccttgtcagtgcgtctgctcatatgaagggatagagtgatgaagggaccgattggttcaatcggagaaggaggaataagggaaaggacagggacggaggtttcccggacgcccggaggagcgtgcaaggagctccgtccctgttggatgatttttgttgggggttacagcgtttgctggattttttccagcgtgtagcattcgatgatgtcgcccgtttcgtattcgttgaagtctccgaggcggatgccgcattccagacctgccttgacttcttccacttcatcctggaagcggcggagggtggacattttaccgtcaaagacgggcgtcttgtcgcggatgacgcgtgcctcgcagctgcggaggattttcccgtcctccaccatgcagcctgccgcacggcccttgttgagcttgaagacctggagcactttggcgtggccgatgatggtttcgcgcgtttccggttccagaaggcccagcatggcatcccgcacctggtcaatgagttcgtaaacgatggaatacagttttacctgcacgccttcccgcttgagcagtttgacggcgttggcttccaccttgacgttgaagcccaggatgacggcgtccgaggaggaggccagcagaacgtccgattccgagatggggccggcggaggcgttcaggaagacgcattccactttgtccgactggatgtccagaacagctttcctgatggcttccacggaaccctgcacatcccccttcaggagtattttgagctgggctttctgggtgccgtcccccatcatggcgagcagttcttccatgcgtgccttgcggggctgggccaggcgctgcttgcgcagttcctcctggcgttcttccccaagctttttggcggcgcgttcgttttccatttccaccagttcgtcccccacgttcggggtttcagagaagccggtgatttccacgggcatgccgggccctacctttttgacgcgttcgccgtggtcgttgaccagggcgcgcaccttgccggcgtaagggccgcagatgaagggcatcccgacgcggatggtgccgctttccacgatggccgtggcggagctgcccgtgccgggttccacgcgggcttcaatgatggaggcgcggcagttggccttggggttggcctggagttccagcacttctgactggaggacgagaaggccgagaaggtcgtcaatgccggccccggtcagggcggagacttccacgcattccacatcgcctccgaagtccgtgggaaccagcccttcttccatcaggccgctcttggttttgacggggtctgcggccggaaggtcgcatttgttgatggcgacgatgatggttttgccggctgccttggagtgggcgatggcttcccgcgtctggggcatgatgccgtcattggcggccaccaccagaaccacgatgtccgtgacgtccgcgccgcgggcgcgcatttccgtgaagatggcatggcccggcgtatccaggaaggtgagcgtgctgccgttgtagtcaaccgtataggcgccgatgtgctgggtaatgcctccggcttcccccttggccacgcgcgttttgcggatgtagtccagcagggatgttttgccgtggtccacatggcccatgacggtgatgatgggcgtgcgcgtgatgagggtggctttgggttcttccaccaccggcacgggttccggttccttgacgggttcctgctgggctttcacgccgccgcccttttcccgtttttcacgggcgaatgtgtagccgtggaggtcgcagatggaactgacggcgtccgcatccagcggcgtgttcgggttggcgaagatgcccatgcccatcagatccttgatgatttggaagggcttggctttcagcatgcccgccagctcggaaacggagacgggcggcttgaggttgatgattttatcgtctgcggagggttcttcctggggtgcgggcgcggcgggttctgcggcggccggggcagcggcgggcgccggagcggcgtcagcggcgcgcgacgcttttttcttgttgccggaaagcaagtcgagagcttctttcttgactggagcagggcgggagggagccggtgcgggggccggctggggtgcgcgtttctttttggaagatccgccgatcagatccaatacttcctttttgggttctttctcttcttgtttattaggcatcttgatttaaggttgttagatgttgagcgccgcgctcaacggttattgggagataaggtcccgggccttgtccagaatttgggcggcttcctctgcgggaatgcccatgctttccgcgatgtcggaagcttcaaatccggtgagggctaccaggtccgttccgcccatggtcaccaggcccatggcggtttcttccgggatttccaattgttcgctgagggttttggccgcagcctggcattggcgcatgacttcttcggccgcagcctggctttggcgtttttccgcttcctgaacgtcaaagacgcgcacctggacatcccagcccatcaggcgggaggtgaggcgggcattctggcccctgcggccgatggccttggagagatctttgtcgtcctggacgataacgaagatttttctggcttcctcgtccacggtgatttcccgcggttccacggggctgagagcttcccggacgaaggtgacggggtcttccgtccattccaggatgtccactttttcattgttgagctcccggacgatgtttttgacgcgggcgccgcgcatgcctacgcatgcccctaccggatctactttgtcgtcatggctgatgacggccactttggtgcggtagccggcttcgcgggcgatgccgtggatttccacggtctggtcgcctatttccaccacttccgattcaaagaggcggcgcaccaggttcggatggctgcgggaaaggatgacttccgggccgcgtgcttccgtgcgcacttccaccacgtagaagcgcatgcggtcgccgacgctgtagtcttcattcggcacgcgttcgcgggaggtcatgacgccttcgaatttgccgaggtccacaaaaatatcccccttttcaaaacggcggatggtgcccgttaccagatctccggcgcggtccttgaactcgtcgtagagcatttccttttccgcatccagcagtttctggagcatggtctggcgggcggtctgcaccgcgatgcggccgaagcccttgggcgtgatgttggtggggagcaggtcgtgaagcacggcgtttttgtccagcttgacggccagggaaagggggatctggttgaatttgtcggaatattcttcatccggcaccacttccaggtccgcaaaaatacgcaccttgcccttgtccacgttgatttcggccctcaggtagttgatgctgccggaaccgggaaccattttgcggtaggcggagagaaaggcggactccagagcgaggagaattttttcacgggagagccctttttccctctcgtagtagtcaatcaaagctttaatatcgtttgtcatgagtgtggaggagtgtgatggatagacaaaaaagagcgggtcgacagacccactctcgagtgcctctcggggtgtttgcctatctaagtaagcacgagggggaggttctggcaagaaaaaacgcttgttctatgcggcatgcaaaagactggggatgattcctgaagaagaattttccggagccctccggaagggggcgggacaacggtgtttgagggcttgacggacccgtgaaaaacgggaagtatgcgcgcatgaaactcgtctcatggaacgtgaacggattgcgggcggttctgggcaagggaatggcggacgccgtggatgccctggagccggacgtcctctgccttcaggagatcaaggcgcgtccggaacaggtgaaagacctgtggatttcctcctggccgcaccagctctggaatccggcggagaaggccggctattccggcgtgctgatcctcagccgggtgcggcctctttccacgtccgtcggaatcggctggccggagcatgaccgggaagggcgcgtctgcacgatggaattcgaggggttttacctggtcaactgctatacgcccaattcacagaatgaactggtgcgccttccgtaccgggagcagtgggacgccgcgttccgcgagtatgtggcgggactggcggaaaccaagccggtcgttttctgcggagacttgaacgtggcccatgaggagattgacattgcacgtcccaaagagaaccgtttttccgccgggttcagcgaccaggagcgcgccgggttcacgctgctgcttgaggccggttttacggatacgttccgcgccctgcatccggaggagccgggctggtacagctggtggtcctaccgcgcgggcgcccgcgcccggaatatcggatggcgcattgactatttctgcgtttccaatccgctggcttccagggtgaaggatgccgccatccatccggatgtgacggggtccgaccattgccccgtcagcctggagattgactgctgagcgcggtctttcagatgattttcaactgtaaaagattgatgattatggaacaggaattgccgctgctggtggttgccacgcgcaacgcccacaagaccggggaaatccgcgccatgctggccgggaaatgggaagtgaaggatctttctgactatccccaggctccgcccgtggatgaaacgggagtcacgtttacggagaacgccacgctcaaggcgctttccgcttccaaatgcatccccggcgtcctgctggcggatgattccgggctggaggtggatgtgctggacgggcgccccggagtctggtcctcctccttcggcggggaggaagggaaccatgcgcggaataacctccgcatgatggaggaactgcggcgcgccggcgtgaagccgggggacaggccttccgcgcggttccgctgcgtcatggtgcttgccgggaacggccgcgtgctggcggagttttccggttccgtggaaggctacatgttgacggagccggccggagaaggagggttcggctatgatccgctgtttgtcccggaagggtatgaccggagtttcgcccagcttcccatggaagtgaaaaattccatgtcgcaccgcgcccgcgctctggcgcaggtggtggagtggatgaaggaacgccgggcctgaggtttttcccggacgcctggcggcggggaggtcagtccagcctgaaggcgcatatctggaagggagccggtgttccggtgttcaggagctggtatttgccggcgcgccaggaatgatggggcaggcgggacaggaaggcttccacggcttccgcttcttcctttcctccttcgtggccgggatagcacatgacgctgagaagcccgttcggggcaatgagggcggcggcctgttccagcgccgccaaggtgcattccgtcctggtgaccgtttttttgtccccgcccggcagatagcccaggttgaaaacgatggccttcacggggcctccgaccagttccgccaggcggtcatggctggcaagatggagccggacggaaggggtgagcagcccttccttctccagacgctccctggtggcgcggatggcttcttcctgcacgtcaaaggcgtgcacctggccggaagggccaaccagccgggccaggaaaaccgtatcgtgcccgttgcccgccgtagcgtccacgactgcgtccccgggggagacgacgcggctgatccagtcatgagcgcaggtcatggggcggctgagcagggaacatttcatgaccgggttgtacagaagccttgcctgtatgacaattcgtttatgaaattccggtgcgggaagaatgacaggttgttttttggcagggcgtgtgttaggaagaggcataaaaccttctgcgtgttcccgcatgcggggataaaccacagacgttgccatgaagatgactgacagacgcacttttttgaaaaggactgccgccgcaggggcgctggcggccatatcggacatggattccctgttcgcccaggaggccggagccccggcggcttccggcatcccggatctggtggccgtccgcaacggtacccgtgcggagatggtcaggaaggccgtggaggcgctgggcggcatgcaggctttcgtcaagccgggccagaccgtcgtcatcaagccgaacatcggctggaacaaggctccggaattcggcgccaacactcatcctgaaaccgtcgccactttggtggagctgtgcaggcaggccggggcgaaggaagtaagggtgtttgaccactgctgccacaacggcgcttatgagggcagcggcgtgaaagaggccgtagagaaggctggcggtgtgatggtggacggcggcaatgagagccagtacgtgcggacggaaaacccgaaagcccggaaattcacctccgccaaggtgcataaggccgtgctggaagcggatgtttatatcacctgcccgcccctcaagcaccacagcggttccgagatgaccgcctgcatgaagaatgtcatgggtaccgtctgggaccgcggggccatgcataagaacgacctgcaccagtgcatcgcggacgccgtgtatttccgcaagccggacctgtgcgtgctggacgcctatatgcccatggtgcgcaatggccccgtggggaaggatacgaatgacctggtggagcgcaaaacccttctggcttctcgtgacatcgtggccattgacgctgcgggcgccgccctgctgaacaaggccggaaaaattcgccatgtgcagcttggggaggaaatggggctgggcgtcgccgacctttccaggcttaatatccgccgtatcagcatggcctgacgcggcggctccttctcccgtctgcggatgacgcggtagggggccaactttccgcctccggcgggtttatgataaatatgtcagtcatcaaagcctttctcgtcagtcctctgaagtggctccgcgtgacggtggccgtcattttctttattgggattgcatacgcttttctgcaccacattcccgcgtggaacgtgccgaacatgacggggggcggagaggggatggaagattccttttccctggcgcggtggcaatttgtgccgtccgtgctggagaccctgagcggggcagccgtttccgccgtgattctgggggttttgctgctgcttacgctgctgttcggccgcgtatactgttccttcatctgcccgctggggattctccaggatattgtcttcagaatccgccgctggctggcgccgaagcgtttcctgaaattctcccggcctgtgccgtgggtgcggtatggggtgctggcattgctggccgtctgctgcgtgacggggctggccggtctgtctctgaattggctggacccttacagcattttcgggcgcatcatgtatgtgctggcatggccggccgccatttggagcaataacctgctggcggcggacagttcttctgcggacctggtccagatggattatttccccgcggctttcccggttctgctggcttccgccggcatgctcggcttggtggccgtcatgagtgcctggaagggacgcctgtattgcaatacggtatgccccgtcggcacgctgcttggcctgctttcccgtatctcccttttccggctgggctttgatcccgcctcctgcaagaaatgcggcaaatgcgtcaaatcctgcaaggcgcaatgcctgaacctgaaggaatacaaaatagactcctcacgctgcgtggcgtgctacgattgcgtgcgctcctgcagtgaggggggaatacgctaccgctggtttaccagggcccgccaactggttccggcccaaaaaaagaaggctcccccggctcccgctccctcttcttccgccgcggttccctccattgccgggagttcccgccgccagttcctggaggctactgcggccgggctggccacggccgccctttccggatgccggggagatgccgcccggaagctggaccccacccagtgcgttcttcctcccggagccggttccctggaacgttttctggatatctgcaccggctgccagatgtgcgttgccaactgccccacccatgtgcttcagccctcatacctgcagcttggcctgaagggattcatgaaaccccggatggattttgccaccaaatactgcctttatgattgccaccgctgtgcggaagtctgccccacaggggccatacgcaggatgcctgttaccgcggaaagggatactgagggaataacaaaagatactacgcgcattgccgtggcccggttttacgtctgccgctgcctggttgcccgggaggacatggattgcggagcctgtacggagcattgccccaccaaggccctttacacggtgccctatatcgggcgtgacggccaggagcaccgcctgcccaggctggatccttccctgtgcatcggctgcggcgcgtgcgaacacgcctgtcccgttaccgcggaacggcctgaggaacgcgaacgccggaactcctgcgatctgtgcgaggaaaaatgcgagttcggaaggcggcgggaaatgcccccccgggcgctggtggtccgtgccgtgaatccccagcagaaagctgttaaaaagtttgaggacaaagctgtggatccggtgggggatgcggattttccgttttgaaaacggctggcggtttggaagatgatgaaataaacgctcccggaggcttcaaacctcccttttgggagggcggtgtctgtccatccggtttttcgggggaattccgtgcagcccggtttgcgcacggatacggccgcgggggatgccgagatgagcgggggcaggaggagcctgaccacgggagcgttcccgcggctggcagggaaggtttccggagagcatgttctccgttgctggcgggatagagtgcaaatgcccgattttccttgatgatgcggaagttgatacgttaaagtaaaagaaccatgttgcaggcggacggcattacgtatgagatagaaacaccggatggtcctttgaaattattggacaatgtcagttttaatgttcctcgcggtcattttatggcggtcgttggtccttccggctgcggaaagacgaccttattgaaggcgattgcgggcatgattgcggaaacgggcgggcgttttttctggaatggccatgatttggctgaagaagactttgaaccttcggaaatcgggttcgttccccagttcagcattgcctatgaccagctgagcgtggatgagaatgtggagagcgccgccaggctccgttgccggttcaattccgtggacgatttggacgacagcattgacaatgccctggaggtaacgggaatggaggggattacggaccgggatgtgaaaattctttccggcggccagaaaaggcgcctggcgctggccatggaactggtatccaatccccggctgctgatttgcgatgaggtgacgtctggactggatcccaggtcggaacacgatatcgtgttcctcctgcatgaaatctcccgttcggaaggccgcatcgtcatttccgtcacgcacagcctttcccatctggacaggtatgattccatcctggtcatgcaccagggctgcgtggcttaccacggttctccgaaaaccatgctgcattacttcggcgtttcctcgctggaggagatttacccgaagctccaggatcgcgaaggcccttcctggagccggtcctggagcaagcaccgggattcctattattcccgtctggaacaggaaagggaaaagaaaattctttccggggaactgccggatccggatgccgtccgtcctgcggaggcggagaaggagggggcctccggagaatccggaacggaacgggaaaaggccgtggaggaaaacattccggaagttcccggattcttcacccagttcttttgcctgctggggcggcgctggcgcatctttttccgcgaccgttcccagttggttcttcaattggtcatggtgctgctgtttcccgtgctggtagccatgtttacggacaagggctccgggcaaatcgtggggctttccgccacgcaggatgtccagactgtccagaaggatatggaagcccagcagctgaacatgaaaacggggtccgccgtctccggcatcatcatgtttgaggtgattctgctggggctgatggggtccaacaatgccgcccgcgaggtggccggtgaacgcgccgtcatggaaaaggaaaagtatgcgggcatgaggccttccgcctacctggcgagcaagctgtcctatctgagcgttctggtgctggtgcaatccgtctggatgtttgcctttgtggattttttctgggaccgtggcggcggcctgacgcatctgctgttcctgattttggcgaacgccgccatgacttttgtatgcctgggcatttccgccctggcccggagtgcggaccaggcttccctgctgagcatttatctggtgggtttccagcttcctctctccggagcggtgctggcgcttccggaatatgcggagagtttcatacgccccttcatttccgcgtattgggcgtggtccggcagcatctccgccctgaaggacgacgtatattacgccgtcaagaatgtgctggatacggacctgactccctccctggtttgctatattgttctgggcgtgcatgttgcgtgcggcattgcggccgcctacgcgggaatccgccgttcgcgctgggagcattaatttaatgcgtgcgcttgcgggaagtacgttatatactttttccatcagaaattatggcgagacggcgtgcagcaaaaaagaaaagttcctcatcatccgcactggttttgacggtcggggcggcggtttttgtgctggccgttattgtggggattgtcatgttccgagccggggagaagccgcaggccgggtcggatatacctctggacattctggcggcgaacgcctcccagctttccaataacaactatgcactggacggaacggtgattgaccgttttccgcgcggcgagtccgaacttattgccttcttgtacaaagacgcctccgggcgtgagtacattattcccgtctgtgtttccgctgaggctaggaacggactgaacatcaaccgggaccagcaatacaggatagagttccgggtgaaagacgtcaatccgaaggtgcgcggcgtgtgcgtagctacatccattcagcctaaataaacaatctccctcgtcctatgaaatgctgttttttgatgaccctggcctgcgcggttcccgccttggggcagatgatgtacaaccctcctgcagccggcggtgcgcctgccgcgtcccctgcctcccctcccgccgttcagccgaatgcctaccagccttccaggcagggggatgccaagtccctgtacggcaatgagcttcctttcctgaaccctcaggacggcacggtgaccatcaacggaacgacgttgaatatgggcagtttccgggagattgaagcgcgtttcaacaagtacctgagccagccggaggaaagtacggaagatgcgaaggaatatcagaaaatttttgaaaagctccacgaaacgctctccatgcgcaaggaaaaactggtggcggataatgtggtgcggcaggtagtggacctgttgaccgccgcttccagcaacccgctggacggaggcgtttccgacgctctctgccaggccatttacaccgcgtggcaggccaggagcaatggaaaaaacaaggggaagatgcttgaggcggtggaaagggaaatccgcagcaacgcccagaagatgagcctgatggaaagcggcgtgacgacgatttccggtgcgccctccggccagaagggcgggaaaaagggaacatccaccaatcatccggccaaaaataacccccgttacaaatatctggaaaagcgtgtagtggagatggaagcccgcaagctgaagctggaaagtgaacaggttctgacggtgacggaagcgaagattgtttttcagtctacgctggttcaattgtttgcccagcggcgttttgaccatgtttccataggctgcggcgtttacagccgcctgttcaatgacggggataccaagctgcggctggataagaattccgatgccgccaagatgttcagcggtacgctgggcgctcctcccaccgtcgctatcctggacaacctttcccgggagctggcccgtgactccgaccggcacatgaaggccgtgaacaatctggtggattcccatcattacgtggatgcgctggaacggctgaacgaagctctcctgatcggggaattcatgcccgccgtgaatacgtttccgtatgagaagaagcaaaaactgtatgccttcaaacgggacgtggaaaagttgttcgagttgatgaacggcaaagattacgaagaagccctttccctggtggagaaccttaagaagacttccagggatttcagtacgggccgtgcggagtccgctatcagcgccgccgtattcgccagtgacgcctatatttcccaggggcaggaagccctggccaggggggaccgcgccaaattggaggaatgcctgaaaagcgccattgaaatctggccgaagaatccccgtcttcttccgctgcggaacgccatgatggccgcaggtcagcaatcccacgctctggaggatttcaagcgtttccacaagaataagaattatcgccgcatttttgacaaccagcatgaatttgccgttctggtgaaggatgatccggagctccagaagcagtttgtggaagatctgggcaaaatggccgttattgagcgtgccctgggcgcagcgcgccagcgtgaagccatgcaggacgtatacggcgcctgggaggagcttcaacagctgcgttccagggaccaggaactgttcatcaatgaccaggagctgaatgcccggtatctggacctgacgacaaaggcaagcacactggtgaatctgctgaatgatgcggaaaaatgcaggaatgcgggagaagtggggtctgccctgggcaaatacatggaagccaaaaggctgtatctgtattcccggtttgccaaggagggaattgagtccctgctggaagaagttcttccgttgaactaggcgggtggattccgccggacggcgcgcctgcggagacggagtaattgcttttcttccggaacggtgccgttatgctacggctcatgaaggcagtatacctgtgtttgtgcatgctggcggcgttctgttttccggctgcggcgctccctgcggattgcagccaggtgattgtaggttccgcggacgggtggaatagttcccatgtgcagttgagccttttggagaaggggccgcggggctgggtgatggtgaagggaccgtttccggcgcgtctgggaaaatccggtctggtctggggcaggggcgtcagcctccctcccgccggagggccggtgaagaaggagggggacttgcgctctcccgcgggaatttttgaactggggggcgtatatggaactgttcccgcgccgcagaaaaagcgttccatgccgtaccgccgcattacgccgcgggacatgtgggtggatgaccctgcctctcccctgtataaccagcactttgtgctgaagcgtgatcccgtcacgccttgggagttcaagcagcagatgaagctgaatgattacgcccacagtctgaaactgtttatccggcataatgccgcagacggacggcagaaacccgtgccgggtgcgggttcctccatttttttccatatctggcgccgggacggaggagcccctacggccggatgcaccgcaatgagcgaggaaaatttgagggccatgattgcatggctggatccttccagacatcccctttatatcctgctccccgccagggaatatttgcgcctgcgcagagcctgggggctgccgtgatattttcagaatccgcctttgcaggcacgcctgttccgccgccccgggacggacaggggagtggtttaaaccctacggatggaagggctgttggatggtgcggctcccgtgccgtgctgcacgttcgttgctgcctggagttccctttcccgtaaatgcaggaagccggcctttgaagaaaggccggcttccgcatggtaaaacggttattgttcctgggactggggagcgggagcttccggctggagcaggggagtggaggtttccttcacttccgccatggaatcctgttcttccctgggcgcgcggtcttcgcggggctgccggggttgttcctggcgttcattggctccgctgaccagcagattgcggcccatgaaaggctggttgtggagaatgtccacggaacggatagcgtcttccatcttcttcatttccacaaaagcataccccttggatttgtgggtgcgggggttgtaaatgatttccacggaattgacttccccgatgcccttgaacacgtcctccaggtcgctttccgtagcttcataggaaagattgcccacataaagccggcggttggagacgggctgtttgggtgcggaaacgcgatcctgcctgttgcgggctacgcgggtgttggttttggcggcggctttatccctggccgcatgcttgttattcttggacggacgaatgccgaagaggcccaggaaacgctgccacaaggagagtttggcgggcgcttcttttctgtacttgggacggtaaccgctggaatcgcggcggtcattgccataggagcgtccgcccttgttgtagcggcggcgggctccctggccctgtcttccctgtgtgttgtgttgtgacatacttatatgctaagttggtgattatgttggtgtcatgccggatttatcgctgtgtgcagtaaattccatccggaggatcgccgggacgttccgctgccatgagaaaagccaggagtaagggggccccatgccccgatcaacggtccatgcatggtctgataggggggcgatcaggctaggcgcgtgaccagtccggtcgattgacgcgtataccaatgcacagggagccggattcttgcaagccggtatctcgtcattttaggctttccgcccgcccggaggcgggaaggccgtccgggaggcaggcttccgtgccgggcatggctcagagtgagcaaacaatttgacaaaaagacgaggacggagcattttaaatgccgactaatctacatattctctcgatgctgattcaaaatgcagaccgtactacctacgggattaataagattgttgttttcgtccttgcgttcatcgtcttcttcgttgtcggatttgtgtcctggcaatgggatggggtcgctccggaaccgtggcgtctgcggacgctggtgctgacgccactgacgatgtctctgctgctgtatgtgtgctgtgaccagttcggcgtttactaccgttgccagacgctctgggaaagcatccggcggtttgtggtggcatatgcctgttttgtggtgttaagcgtgatgatatggaagttctttgttcccttctccgcggatgtcggtgtccagtccctggcgtatctgcttaccttcctgggttccctctggctgcgtatcagccggttccgggcggaaaaaaggctggtggaggaagcccctacgctggtggtgggaactccggaccatgtgaaagaattccgcaggacgctggagagcaatcatgtggacttcaggaatgggctgctggtcatggcgcctgaagaggtggacagtgcggtagtcaggaatttgctgattaagaactgcgtcagcaaggtggtgtttctgccggaggaggtggattcttccgtggcgcggtgcctggtggaactgtgcggcaagatgggagtcgatttttacgcgagcatggtggtaagcatgcccgccgtgcataaaacctatttcggcgtgattggaggaacaagaatgctggtgtacaaatccacccccattccctataccacctcctggcagttgaagaaaatgctggactggacgggagcgctggcacttctggtgggaacgtcacccctgtgggtgctggcggctgtgggaatcaagctgtcggatcgcggcccggttttttaccgccagaaacgttccgggctgtatggccgggagtttggcatgtggaaattccgcaccatgtaccgggatgcggataaaaggctggatgaagtgaaagccaagtacggcaatgacatggacggccccatctttaagctggagcacgaccctcgcattttctccttcgggcgcttcctgcgcaaattcagcatcgacgagcttccccagctcatcaatgtgctgaagggggaaatgagcttggttggcccgcgcccgctgcccgtttatgaaacggaagcctttaccagcgatgcccaccgccgccggttgagcgtgctgcccggcgtgacggggtactggcagattgccggacgcagcaacatccgggaatttgaaaagctggtggaattggatatgaagtatattgacaactggtccctgtggctggatatcaaactgcttctgaaaaccgtcccggcagtgcttttcgcccgtggggcaaagtagcttcctggtctctctggattgcaggccgtcagccgttattgccgggaatttggaatccggctggggttctctgtccggtggaacaggcctgttttaagaatactgcaattcgggagagggatggaattggtgtattttgtgggaaatgaagaaaattattgccggacagagactttaatcttgaggtgcggaaagggatggggcagaatcaatctactatggatttagttcagcgagaaatctctaaagaaacggtgactccgtatttcatcgagtatttcggtcaggcgcctactcatgtggcagcggcaccgggacgtgtgaaccttattggtgagcacacggattataataacggttttgtgatgcctatggcgcttgataaccattgtgttgtggctgtggctccctcccccgtgggcaaacaccgcttttgcggttccctgggtgaccagatccatgaaattgcggtggaagacgccttggttcccggcgaaccgttctggtccaattatgtccgcggcgttttggccaacctgcacaggcgcggcatagaaatcgggcctgtggatatgctgattgacagcaatgtgccccgcggcggcggcctctcctccagtgccgctcttgaagttgccgtctgtacggcgctcgccgcttttgccggcgttgaaatagatcccaaggaagtcgccctcatcgggcaggccgtggaacatgaattcgtgaacgttccctgcggcatcatggaccagtttatttccgccaacggcaagaagggcatggctctcaagctggattgcgccacgctggaatatgagctggttccgatgaacaatgagtccgtatccgtgctggttctggacagcgctgtgaagcattccctggcggacggagcctatggacagcgccgcaagcagtgtgaggaagcttcttccatcatgggcgtaccctccctgcgggaagctacgctggagctgctggaatccttcagggaacagcttggcgatgtgcgctatcgccgcgcccgccacgtcattggagaaaatgcgcgcgtgaacgcttttgcgaacgcccttgcccgcggcgattgggatgaggccggcgtagccatgcgcggcagccatgcttccctgcgggacgactatgaagtttcctgtgctgaggtggatacccttgtttccctttgtgaccgcattccctccgcatcctccatttacggagcgcgcatgacgggcggcgggtttggcggatgcattgtggccctggtgaagacggaggacgtggaaaaggtggcccaggagcttctggacggctactgccaggaaacgggcattgaaactacgtatcttgtaacccgtgccggagaaggcgcccgtgttctgtaccaagcttaatccatactgatgatgaaaacactagcaaccatattcggggcgctcgccctgatgacgtggggcgcagctgcccaggagggtcccgtacctgcaacggcggctgatgcgcagcccgccctggccgctccggccgcgattcccgctgttgaagtccagccggcagcggaaattcagccggcggctcccgccgcagaggctgtacaggctgaacagaccgcctctgctgagcctaaaacggcccctctttccatggtggaagtcattctcttctgcgtggtcgtggtgggcgtgatcgccttgggtatctggaagagccgtgaccccgaagaaacggaagaggaaaagaaggccaagggcgcttcagactatttccttgccggccgtggtttgacctggtggctggtgggtttctccctgattgccgccaacatttccacggaacagtttgtggggatgtccggcaaatcggccaactgggtgggcatggccattgccgggtatgaatggctggccgctatcacgctggtggttgtagccttctgcttcctccccaagctgttgaaaggcggcgtatatacgattcccgaattcctggaataccggtataacacgctggcccgttccctgatggccattgccacgctgctgattctggtaggcgtgccgactgcgggcgtgatttacgccggtgccaaggtgatttccgtgttcttcacgggatactctgccatgggcattgacttcggcaacatcaccgtcggctgcgttatcattgccttctgcgccacggtatacgtgttcgtgggcgggttgaaagcctgtgcctggacggacctgttctggggcgccgccctgattgtgggcggcggcgtggtggcctattttgccctgacggagctcagcggcgcagacccgaaccatttgattcaatccgccgccgccaattccggcgcgacggtcgcttccctagggaatccttcggacagcctctggcatggggtgacgcgcttttttgagctgaactccggtgacgcggccagcggcgtaaataccgtgggcggcaagctgcacatgatccgtcctgcggatgatgcggaaatcccgtggacggctctttgtctgggcctgtggatccccaacttcttttactggggcctcaaccagtacatcatgcagcgtacgctggcttccaaatccctggcggaaggccagatgggtattgtgttcgccgcattcctcaagctcatcatcccattcgtggtggtggttcccggcatcttggcctataacctgtaccgcaatgacctgaaggaacaggcggaagtaaaatacgcggcggaaatccgtaagacggaagatcccgccgcagtcaagggccgccccgtcatctacaagcttacggacagcttcctggtggaaaacgtggaggaaggctgtgcccatgccattcataacgcggaagtaatgaaggtgggcgaagatgttatggccaatctgaaacaggcctgcgccgatttgaaggcggatgccgccaacgaccagactacgctggcggaacgcgccccgttcgtggaaaaaatcgcttcccttaacaacaaaatcatcaagccggccgtggacaactcggataactactatctgacggatacgctggtaggctttgactatgactccgccttcggcacgctgatcaggaagctgcttcccggcacgggctggacatggtttgtgcttgcggccctctttggcgcggtggtgtcttccctggcatccatgctgaattccgcttccaccatctttacgatggatatttacaacaagctgcgcaaaaatgcggggcccacggagctggttaccgtcggcaagattggtttgctggtgtgcgccgtgatcgccctgaccattgctccgttcctggacagcccggcctttggcggcatcttcaacttcattcaggaattccagggcttcctgagcccgggcgccctgtgcgtgttcctcttcggcttctttgtgcccaagtgcccgcgcatcttcggttggttgggtatcgtcattaatgcccttctgtacggaatcctgaaggtatggcagccggaaatggccttcctgaaccgcatggccgtgtgtttcatcacggtagtggtcatcggcttcatcttcacggcggtgaacgccgcccgcggcggacagcctatcgtgctgcccgacaggggcgtggttgcccttcagtcctcttcacgggctaaaatcttcggatggctcgtggttgccgcgacggtcgccctgtacattatcttctggtaattcagggaagacctccagtcccgtattttcaatcctcccggttcaggccgggaggatttttcacgtccggaacagaccatgcagctggcgcggctgaatattttggaggcggaaagccggcaggctggcgtttccggacggaaacggcgccttgttctctgaaaaaatacatggttgaaaagaggccggcaaaacgccataccgcctcttattcctcttccagaagcatgctgcgcagggaatcgaaaaagtttccggattcctcttccgtcgcttccgcgttcatgagatcctcccatttggaatattccatcaggtggggaggaatttcactaaggaaggaggagcgctggcaaggcatgcggtccccgtagcgcaggcgcgtggcgcaataagtaagcatgagtttctcctgggcgcgcgtgatgcctacgtaaagcaggcggcgttcttcgtcgcaattgccgtcttccagggaacgcttgtggggaagaatgccttcctccagccctacgaggtacactaccggaaattccagtcccttggcggcgtgcatggtaatcaggcatacgcctggcttgttttccacgtcgtcatcattatcctccttgtccagggtgacctgggccaggtagtcccggagggtttttccgggttgccagaagttgcggagggaggctttcacgtccccgatggacaccagccgtttctggatttcagcttccgttttgcacaggcgcgtgacgtattcgctgaatccggtttcctcaataagctgctccaggatgtctccgaagtcggtttccttatcctggaaaaggtcaatgtattttgcaatcagttcattgaatgcctgcacgctgttgcgggcgcgggtggaaagggccgtcaggaattcttcgtcctggagggctgcccagacgctgttgccgtgctcccggctccagtcgatggccagatggctggtcagctcgctgatgccgcgcggtggcgtgttgaggatgcgcagcaggtattcgtcagcctgcgggttttcgatagtcgccagataggaaatgaggtctttcacctccttgcggtcgaaaaaactttgcgcgcccaccatgcggtagggaattttgtgttcccggagcgtttgttcaatgatgcggctctgggtattggcccggaacagaatggcgaaatcctcccagggccggccttcctgcctgcggacgttttcaatgtccgtaatgatgaattccgcctcttccgcgtctccgggcatggaaatgagccggacggcttctcctccgcctttgtgggcgcgcagcgtcttgtccctccggcccaggttgtggcggatcagggcattggccgtgtccaggatgggggcggtgcaacggtaattttcttccagtttgatgacggagggatttgggaaaaaacgttcgaattccaggatattgctgatctgggcgcctcgccagccgtagatggactggtcgtcgtctcccactacgcagacattgtgttccggacctaccagatggcccagcaggctcatttggaggctgttggtatcctggaattcatccacggtgatatagcggaagcgctgttgccacgcctccctgacgtcccggtgctccttcagcaatttgtccgccagaatcagcaggtcgtcaaagtccacggaattctgcgcctgaagttcccgctggtaggaggcggcgatgttggctgtcaggttgtcttcaatggagtcaaggcccagaccgctgtttttcatccggctcatggaagaaagcacatctttgggcgtgattttctccgtaatgccgccgtggcgcacaatcagtcgccggatcaggccgctttgctcggaaccgctgtaaatggtgaaattggtcttgtaccccaggcgccctatatcctctctcaggatacgaacgcaaagagaatggaaagtgctcaccattatttggcgcgccgccttgcgttccaccatctggcttacgcgttcccgcatctccagagcggccttgttggtgaacgtcacggccaggatgcttttggggctgatgccacggtccaccatatgggcgatgcggcaggtgacggtgcgcgttttgcccgttccggccccggccaggatcagcacaggcccctgcagggtctgcacggccttcctctgggccgcgttcaggctctccatggaaaaggacttggccatttatacgtcaaaatggatatctttcaaattcgggtggccggcaatgagctgggagatattcatgcgcgtgctgccttcaagctggacgtctgtcaccagcaatcctccgcttccgcaggcgatcaaaagcccctgttccccggcggagagcacctggcccggttttccctccgcttccgggaggatggaaaagccggggaaaattttcatgttgcggatgcgtttcttgcggttccagtagttggtgaaggtaccgggccacgggtcgtacgcccggatcatgcggccgatttcttctgcggggcgcgtccagtcgatttttccgtccgcccgcaggagcttgggggcgtatgttgccaggatttcctgctggcggatgcgcgtggccgtccctttttcaatggaatggatgacgggcagcagcacatcaggcgtcatcctggccagcttgtcatgcagggtgcctccggtttccgagccttccaggggggtgctgatctgggcgatgatgtctccggcatccagcttcctgacaatgtgcatgatggtgatgcccgtttctgcatcgccggatttgatggcggactggatgcaggccgctccacggtggcgcggcaggagggaggcatgtgcgttgatgcagcccatgggcgccatatcaatcacttcctggctcagaatctgcccgtacgccatgacgacgatcagatccggattcagtctcctgaggttgctcagcgcatccgggctgcgcagggaatgcggctggagcacgggaatgcccgcttccctggcaatatttttgatggccggggctgtaagcacctggtgcctgccgacagggcggtcgggctgcgtgactaggcctgccaggtccgagtgacggatcaggctgcggaaggcgggaatggcaatgtcgcctgtgcccatgaagacgatgcgcatggctggaagcttgccctgacggcttgcgcaggtcaatgttaaatccggttttgagaagggaataatagggaagaaaggccgttttttcccgttcctttccgtccggagggaataccggaggataatgttttttccggccgcttcccctcatgtcctccctcctgcaagaagttcttttcgacggagcggaatattggtataccctgttccatgcagaaaggacggctgccgcgcattctgattgtgaccgcaggatacggggaagggcacaattccgcagccaggggcgtgagggatgctcttgcagggcgcgcggaagtccgcgttacggacctgtgcgcggaggcgatgccccggatgttccgcctgacgcgcgccgcctacctgtggacgatctcccgcatgccccgcctctggaaatggatgtacgaggtgagcgacaggcgcaatatggcggagaagcccgtcaggggaattgcccccgtggaacgcctgctggaacgtttgctgcgggaatggaagccggatgccgtggtctgcacctacatggtatatccctacatgctggattccctggcctcccgcacgggcagggcggttccttacctgaccgtcgtgacggattccttcgtcatcaataaatcatggctgtgttccaagtcccccctctgggccgtaacggacccctggacgagggcaattatggaggaaaaggggctgccgcaggacaggctgcgcgttacgggatttcccgtcaatcccgtgctgggagcgctggcggaggaacatcccctttcctggaaagaaggggagccgttccgggtgctttactttgcccagcgttccgcacggcatgcgcgggcggagctggcgggtatgctggatgcgaatcccgccctgcatgtaacctgtattctggggcgccggttccggcgcatttatccccgcatccgggatttgcgcgccagatacggacgcaggctgacggtgcgcggctggacgcgccgcgtgccttcttatcttgccgccagtcacgtagtggtcgggaaagcgggaggagccaccgtacacgaagtgcttgcggccgcacgtcccatgctggtgaactttcttcttccgggccaggaggagggcaatacccgcctcctggaaaaactgggaggcggcagccatgtgccggacgcccgtgccctggcttccgctcttcaggaaatgatggcggacggcggcgcacagtggaggcgcatgcatgaaaacctgctgcgggccgggatgaccggaggaagcggcagaatagcggatttggccttgaaactggcggaggaacatactaactgattcccgtgacctatcttctgattgacaattccaacacacgcaccaaattcgtgctctcttcgccggaagccctgttaccggaacggtatatggttcccacccgtgaggtgagcggggaacggctggacgaggtgctggccggcgttcgttatgataccgccgtggtgtgttccgtcgtgccgcgcgtggcggaagaactgaaaaactggatcgtcaaaccgtgccatttcctttcctgcgattcccggttgggcgtgggcattgactatccccacccgcgccagataggggccgacaggctggcgaatgccgtaggagccgcggcctattacgggtatccttgcgttgtggtggactttggcaccgccgtgacttttgacgtgatcgggccccaatgcacctacatgggcggcgttattgcgccggggcttgccagcatgggggattacctggagcgcaatacggcgcttcttcccgccattgacccccaggagccgtcccgtgtcattggaaccagcacagtagaggccatgcaatccggcgccgtgtacggttaccgggggctggtgaaggaaattctggcccggctggaaggtgagctgggcgtgcgtccggccgtggttgctacgggaggggatgcagctctgatcgccaggggagtggagcgcattgaccatgtggaccctgacattacgttgaacggcttgcgcatagccgccggactgaatctttaaagaacggccaaaatcggctggaaacctgctgcttccggctccgtggccggatgacgcataaaaactcataaataggtgttgcaaatggcgcataccccatgtagtatcaatgaaccttaacaataaatatcatgtctgacaacagcatcgaagaaaaagtaagaagtatcatcgtcgaccaacttggcgttgaatccgataaagtgactgctgatgcgaaattcatcgaggatctcggtgctgattcgctggataccgttgaactcgtgatggctttcgaagaaaactttgacatcgaagtgcccgacgaagaagccgaaaagcttcagtctgttgccgacgtcgttgcttacatcgaaaaggttcagggttaagttaaactgctaaaaatcctttattacaaaagcggcttccctgtccaaggcaaggaagccgctttttcatggaaagcctttccgccttttcttccatgagcgacctgccttccttttcccgtgacgatatccgctatgcggcggagatgacacgggtggtgtatgaaccggaccgccgcattgatacttttggcgataccaggtttaattttcttctcctcagcgaactgatggatgaggtgaacgtggtgcgcgtgcgcagcggctgggtggaagcggagaaaccgaaaatcatacggccttccatttacaatgaaatcagtacggaggggttttccggagaagccaagcgcttttttgactggctctccaaaaacgggccaggctttttgacgttgctggaatacgggttcaggttcaaacggtcggaggtgagcgaggaaattctgcatgaaccgcttgattccgtgcgcggccggctgctggaccaggtgcgcaatggagaagatacatttatggctctcattgagggagtggatgacgcatgggaggtctccctcttgaaattcacggtggaaatgatacaaaaatcccatgaaatcaatatctttgacttcaagcgcaaaggtcttctttagccttttggcggcggctttctgtgtccagggagttttggcggacggagaaaattattccctctggccgcgccgtccggaggcccttgctgaagcccgccgcctgatggactgcggcagtctgccaaaagctctggaactgctgcagcctctggcggaacagggaggcgtggtggggaaagaggcgaaggaactcatcggaaggctgcgcatccgccagttgctggatcccaacggaccggacgtgaaaaaatataccgtacggaagggagattcctggatacgcatggtcagaaaactgggttgctctcaggccatggtggttcacctgaacggtttgatggatattcccgctcttcatgcgggagatgtattcaagtaccggcctctggatttccatgtagtggtgaacgtgccggaaaaggaaatctgcctttacgacgggacggattttgtcaagggataccccatcctctccatgaaggacgggggaaaaaagaatgtggaaacgaccgtaaaggatgagcaggcccccgtgtccatctacagcaggcagtttccttctgcggataagacgctggtgctggcggcgggaggctatgtcattgacgctgcccgcggtacgccccgctcgcctgggttttatctgagccggcaggactgcaatgaactggccatgctgaccaggccgggaacgaaggtgactatcctgagggggaaaggagaggaaccgtgaggctggttattcagcgtgtcagtaaggccgccgttcatatcggcggtgtttgtgcgggggccgtggggcccggtctgctgattctggcgggcattgaagaggcggatacggaagaagatgtgcgctggctcgccaacaaggcggcggccatgcgcattttttccgacgcggacggaaagatgaatctttccgtaagggaagtgagtggaagcgtgttggtggtgagccagtttacgctgcatgcctccacccggaaagggaacaggccctctttcatccgcgccgcgaggcctgagcgggccattcccctgtatgagctgtttaagaaggaattggcgtctttgctggaaggcagggtggaaagcggcgaattcggcgcggatatgcaggtttccctgattaacgacggcccgatgactattttcatggattccaggaaaagggaatgagagaaaggatcttatatatttaactttgccccggtttcctgctttctctctatctccatataaacatagaaaaatattgccgatagatctgttgctcctcctgaaaatctgtccttgagaaaggaggaatattacgtctgcacagatccgaacttggccctgaaatagctaaggccggagttctactggctggacgaaattttccgtagcagccgcctgtccatagggagagtaatcgtaagccgccgcaacagcgccctgtgcgtcgaggacctccgacacattcttgttgaagtccatgccgtagcagtacagggaagcgtcctgcgcgagggccagggggcgggaggccaccggttccagaggatcccacaacagcgtgcggagcacgttacggttgtccagcatgtccaaggcggctatctgcaaatagcctcggtacagataccgttcgtggctggcgaccgtgccgttttgggtcactttcttcatgtagcggcgtccctgatagtcgtagccgcactctactataccatactgctgttccgactgtgaagtaatcgtccagttgctttcgcgttagtttggaattttattaaattcttaaatttcatccgaatagaaattatattacttttaatagttaatttaatggcggtaaaatagacttggaatcgaatgttttaaaaattttatatttgagaaaatcctttaaagtagtaatattgtgtttattggctgataagttactatctaaattgccttttataaatattggtaaagattttgttattttgattttttccattttattgtaaattatattaccttcaataaaacttccgcacagtaaacttaaaattattatcattgtattcattttgttgatttttatttttgttctttacaacaatacgtcccccattttcctaatatctttccatctttacggaatattttatctatccctgggttaataatatattttatcatatggttttgaatgttggttatacctatgacacgattcccatctaggcctaatttagattcaaaaggaggtaattgttttggaattcctaatggaattgtacgtcccacgcaatgaacttcaataccaatttgctctgcttcatgataaaagtatgctaagcaaatgatttctctttcacattcttggcattgagtctcattttgtgtactgtttttctccattcgagtacaatctccaataagaatttctcgaataacatcaagaaatgtgtttaaatctaaatttttaggtatcttctctggatctggagataatggttttgtcgttccacacgcattttcaatataattaccctctgtttctgtgtttggaatgattataccgctgccatcattagatgataaccctagattatcaatattcaaactgttaccgaggaacgcataaagattccatcctccctgttcagagatgggatcgcgattgatccacctgccgtctttggggttgtaatagcggtagttgtaatagaccagggcgagttcttcgtcgtttatttcgccggaccactggacgggctggacgagtcttccggtgcgggtggctgttccatagggggagtaatcgtaagccgccgcgatcgttccctgtgcgtcgaagacctccgtcacattcttgttgaagtccacgccgtagcagtacagggaagcgtcctgcacgagggccagggggcgggtggccaccggttccagaggatcccacaacagtgtccggagcacgttccggttgtccagcatgtccagggcggctatctgcaaatagccgcggtacaggtaccgttcgtggccggcgaccgtgccgttttgggtcactttcttcatgtagcgccgtccctggtaatcgtagccgcactcaataatcgtgtttccattccggctggtgaagctcaccgcgcggttggccgcgttgtacacggccgtccagatgtcctgaaaggcttaattaacgtctgagttgagagcagaatgggtaatactggtgtatactgattaagtttactgatcatctaaatatctttcctttacatttatagccctttgttttctatatactctgtcatttttttcttattctccatattcgagtagccgtattcaaaatgcagaataaacattaaagtgaaaaatataatattattatttcagaatccaattagaagagaaaaaatcggaacaaattaatatatggctatggcagttcatgcaaaccttgtttttaagagtacctatatttttccatagaatagctatccagtagcatagatttaaaaatgtacaaattgcatatgacgtatgttttttaatataaattacatatctaatattaaataaataagcgaatacataaaacctgaaaaagccattcctaaaagaaaaaattgtacttgttttaatcgtctgaaagacatatttcctcggatagcaattacaagataaagttcatctggattccaatgctcatttatcttacaaagaacgtatacaactatagccacacaggacatcaataataatgtgtacacagaactcaggaatatagcgatcacaacgcatccgccagactggtacagagctaacagaatgagtgcacataaaacaatgagaaataaagatcctataatttcagcactgattttgtattttctaactatattctgaatttgtctccttttatagaacttttcttcttgctttgtctttgatgttaacaaacacatcaaaaaggacgaaatgagaacccacagtatagaagacataaatctacatttttagttcaagacaggccatggtctaagatgcccttgaggcagtgatgagtgtctggttgcccgaggagttgtattgaggagcaaaggaggggtccgttttcttcttcgatggcggtgtgctggttgaattcgttggtcacataggagagttcttcggccggttcccgtgccgtcttgcggttgccgatgtttgtcgtaactgtaaccgtagggggcgtcgcccagggtggtagcggtgagttcgtttctgccgttgtagctaaagttgttgctgtgaacagactccgttccctagtgcggcccggcgtctaaaaaatcatagtttatgagtagatcatgctctcatgaagtcaatctagagttgacatttgtaggtacaatttattgacatattttgcttgctcatcaagtatatttattaaataatgaatatctgatctttctgattttatctgatctttcatatttaacgctttagctgcgtctctttgatcttctatccaagtatctattttttcttttctttgtggatcgtctttcttgaggtataaatttataatttctagtttttgaaattttataatatcatttggagtgacatcaaatttagaaaaaatatattttcctggtgcaaggtttcttaaagaacatgcttgatttacaaaccattctgtataaatgagagctaaatttgtattaatatttgattcattgttttcttttctgttaatgtttttctgctcaatgttggagcaatttgtgtataataacatgaacactaaatataatattttattcattttttaatttttgggaggtgttgtgagaacccatgatttcgggttttgaggattatcgactttatataatattatattgcttttctttattacgctgtggcatttccattttcccctattacaggaacaccatttataagcctgaacacttacccctaatgcgctctgagatctgccttctcctctcaaaggtcggatttttctgttgaaagtatcgcctgtttgactataacatgttttgttataacaatcaaaccaagtataaactacataacaacaattttctttacatatattattatgatcacattcagatgtgaaattaggacttttaaccgatgctttaacattaattccttttgttcctgcatcctgaatgatcggacgttcctgtgatcttttgcattctttgcaacattttgaacatggatcccctgtttttataaaccccttttttaaccccaaagcatcaaacttattttgagggttgttcccgaggaacgcataaagattccacccgccctgttcagcgatgggatccctgttgatccacctgccgtctttggggttgtaaaagcggtaattataataggccagggcgggttcttcgtcgtgcatctcgccggaccactggacgggctggacgagtcttccggtgcgggtggctgttccatagggggagtaatcgtaagccgccgcgatcgttccctgtgcgtcgaagacctccgtcacattcttgttgaagtccacgccgtagcagtacagggaagcgccctgcacgagggccagggggcgggtggccaccggttccagaggatcccacaacagtatcttttatttatttaaaatgggtagattaatgaataaaggaatatggaggcattttatttcaatccatttataaggcgtaataattaattctaattgtttgctttcttttgtagtaaatacataatatgaagatacttgtgttccacctaacccaaaacttatcaaacgttcttgttctgatttgagttgcacgccatctaatgatttaaattcaaatttagcaattccaattgaatctttaaaagaaaaagaaatgttgtagccatcttttgatttttttactgatgttatttttactaaagttccatttaaattaaattcttcatcttttttaatttttattattttttcttttaatggaactgttttttgtgatgttaatacagtcaaagttccatttaatactttttccaattctgttttaaaaaataacttcactcgacctatactgccatcttcagaaaatagaaaagaaaatgaaccaatagcattacatggatcttgctcttggtgattgaaaagtatgatttcttttccaagactaaacatttttcgactcttttctgaatctgtaatatctattgtaatttctgatgtattttgataaaattttagatcgctatattttacttgaatttcaggaatatttcctaaagaataatttatacatataatactaattaagaaatataatatataattcataatgtcatttgtttaattttaattattttcggaattatgtagaatagttttggcgcaagattttcagaatatcttagatattgatatttaacaaatttctctgataaaaaatcggaaagatcaacgaaacaagactaaagtaaataatgccgattatttttcaaaagaaattattggtaaaataagattcaataataaacctaatacagattttattactaacatggcaaattttataaattcattttaataaaatagccaaataaaattcttgattttttttgtaattaaatttcaaaatttaaaatatatgcccattttattagtacatccaactgtgagtttgtatatatgctataatcattaaatttttctagagccaatgcagccgaatcagcaactaaaacaacatcttttttattcatatattcattccaggaaaaaatcatgatagccggtagataataatgtaatccggatatggaaagccagaaaggaaatgtgtaatgattttgtagataattcgattctattaacgtccattccttaccttccaacagaataagttcttcatatgattcttcgctagatattttataaccatataccaaatcaaaggaaggaatagggtatataggaaatgcggcttttacttctttaaaaaaatcatccattacactttatttttatttttctttgacaattgattacgtttgtccaagcttgttcagatgctttccggtgtcctgaatctcctccttggtaacatttggagttaatagtatctcgagcaattgcattttttagccaagctgcagccttgattttcaacagccaacaacaatctgcgtccttacatttacccagtaatgctgtctctattttggctgcattaacagcactttgtaacatcccatgaaataaacgggtacaatttccagttcctggacctggctgtgataaatcataagcacctgcagaaactattacaattgctcctattacatcgccaattggaagaggcccatctacggctgcagctcctgcggcaaaaggaacagctcttgccatagcattttgaccattaatatcaaaactatcaatagggctgttaccgaggaacgcataaagattccatcctccctgttcagcgatgggatcgcgattgatccacctgccgtctttggggttgtaatagcggtagttgtaatagaccagggcgagttcttcgtcgtgcatctcgccggaccactgtacgggctggacgagtcttccggtgcgggtggctgttccatagggggagtaatcgtaagccgccgcgatcgttccctgtgcgtcgaagacctccgtcacattcttgttgaagtccacgccgtagcagtacagggaagcgccctgcacgagggccagggggcgggtggccaccggttccagaggatcccacagcagtgtccgaagcacgttccggttgtccagcatatccaatgccgctatttgtaaatagccgcggtatagatagcgttcgtggctggcgaccgtgccgttttgggtcactttcttcatgtagcggcgtccctggtaatcgtagccgcactcaataatcgtgtttccattccggctggtgaagctcaccgcgcggttggccgcgttgtacatggccgtccagatgcccgttgacgtcttgatgagggtctggttgcccgaggcgtcgtacgtcggcacaaaaggcgcttccccgctttcttcaatgccggtgtactggttgagcccgttggccgcgtaggcgagttcctcggccggttcccgtgccgtcttgcggttgccgatgttgtcgtagctgtagccgtagggggcggcgcccagggtagccccggtgagttcgtttctgccgttgtagctgaagctgtcgctgcgggcgggttccgttccacgctgctgggtgcgggtgaccgggcgtcccagggcatcgcagctctgggtccgggagacgagcacggtttcccccaggcggcagtctatcccggtgatcagattacgccgctgttcgtaggcaagttcccggacgatgccgtcgggcatcgcaaggctggagagcaggctgcttcctgccaggtagccgtaggcgaagctttgctccgttcccccgtgcctgattccggcgctggccagccttccgtcggtttcatagccctggctggcttcctggaggacgtcggttccctgtttcagggtatagccggaggagcgtccgtaagtgtcgtagtgttcctggagctggtaagagctccctccgatggtgatgctgtcggtgtccggttcgttgcagggggtgtacgtgaggacgcgcgagccggaggcgtccgtgacctgggtcagctggttgaggtggttgtaggcgtactggatgccgggcgtggagtcgctgtaggagacggagttgttgacccccttcttcaggttgtagccccaggtggtgaccaccccccgcgcgtccatgagcgtggatttgaagttcagggcattgtaggcggtgtcttcatgggtgccgtccgcccaggttttgcggatgagcaggcccgtggcgtcatcgtagctccacgtagtgacgtccccgtccgtgcgtcccgtggggtcggcggtgatgtcgcccgcgtcctcccggaacgtggtgaggcttatcatcctgtccgcctcgtcatagccgaagagcaggggctgggcccccgttccccattgcgccgtgttgcggccccggaggtcgtagccgtagcaggtcgtgttgcccagggcgttggtgacgacggcaggctggtcaaaccaggggccgtaggcggtagaagtcgtgttgcccgccgcgtccgtcaccgagatcgtgcgcccggcaaggtcggtgtgcgtcgtgaccgtgttgccccggccgtccgtgctggcgtagatgacgccggtttccgtgtaggcgcgggtatgcgtggccgtgacgcccgcatggtccgtttgcgagatgataaaaccgtcgatgaccgtagcggcggccgtgatgtcggaggtggggatgctgcttttctgcgtccggacggcgcccggaccgtattcgctccattgttcggaagcgtttcccctggggtcgatggaaatgactttgctttccagcgtggacgagagggaggaagccagcgttttctgcgtttcgtcgtaggtcgttccccggctgttgttcctggtcgccgtgacgacgcggtatacttcatcccgggcctgttccacgccgtagctccacgtggtgatgcgcgagttggacaccgtagccggatcggcgagtttccaggtttctttcgttttgttgccgaaggcgtcgtattcccacagggtcgggtccatcgtcgtggccgcattgcccgcgtccgtctgcgttttggtgagctgccccctggcgttgtaggtgttcctcgtgtaaatgactccgccgacggtgttggggacgcccgtgcgcagggtttccccggctccgttgacaatgctgcgctgcagctcggtttgcgtttccccggagacggctttcgtgaaggtccgcacaccgtcgctgaccaggtcgatggcgtagatgacgtgccgctgccccgtgccggattcttccatcaccgttccgtccggcgcgctgcgcgtgatgaatgtagccccggaagggacggtttgcgtgaccgtcaagccgtcctggctgtaggcgtaggtagtgacccggcccaggacgtccgtagaggaagtcattctccccagcaagtcgtactccgtgctttcttgggtagtcatcgcccccgtgtcttgacgcgtggagagtacgcgtcctgccgcatcccgggcgtaggtggtgatggtttccggcgtgatgacggtttccccgtccatcacggcggaacgcgtgacttccaccagttggcgcgccgtgtcgtaggcgtagtccgtcctgatgccgttttcatcgatttcccacagcaggcctccgtcgcacatcagttcgcgctctgtgagccggccgttgcccgccgtccgcttcacccaccggttctgcgtgtcaacttcgtagacggcgctgcccgtgagcgcccattgcccggtggaaagcaggaggtagttttcttccctgacgcgctgcccttccgccgtgatccaggtgacggcgcgcgtgctttgtcccggcacggcttctccgttgatgcgcgtttccaccgtttccgtgtagagggcgccgtgctccgtcgtggccgcgtagtcgtgccacgtttgcacgccgtcgaggtcccggctgaaccgtgtgcgtccgcgggcatggatgttggcggctccggccagccattgttcctccgccgtcaggcgcgtgcccgccacacccaggcccgtgacccgccgttccgttcttttgatgtggttggccgtcgtgtatttccaggtggtggatgtcagcgttttgacatgtccttccagcggaagcaggtctgccgtttccgtggcgggttcgttgctgaagtcggcttctcccgaacaggcgtaggtgtagcgcgtgatgcgcctgccgctttccgcccacggttcgtcccggctgagcaggcggccgtagaggtcataggcgtaatgagtctggctgccgtccggggccgtttccgttctgagccgcccgcactggtcgtaggcgtattgcgtggtttgctcctccgggcttccgtagccttccgccagcgtgagcagcaggtcgcccacgtccgtggtctggtagatggcgcaggtgcgcgccgccacgattccgtttttggagatttccgtgaccagctgccagaccgagttttccggttccagctccgtgcgcgtgcggagggtcgtgagggcgtcttcccccgtgccctgccgcatgttccacgccaggccgtcgttccaccaggtgacggcgtagggctgcctggcaggcgcctgttccgtgatggtgaacttttcctcagcatccagggaaagaataaatgttttcaagggagcgcccgtaacggtataaaatccctgtccgtccgttccggtgatttgcccaggggtatagagcgcgatgacgtaacccgtggaggtgacgttttccacgttgagcaggccgtcccacaggttccagatttgcctcagcgagccgtctccggcatgcctgacgtccagataggatgacgcgttggagatgacctgcctgtccgtggtggtgtaggagaggagcgttcccgtttccgccgagaagaggtattggctgccgtcttccaccacccagcgcaggcaggattgtccttccaccgtggccagcgccgcacgccctccgcccgacgtgtccaccccgatgggcagcacggacccgtccgtgtagcagcgcatggcaattacccggtctccctgcaccagattaaaccgtgctccggggacaatgcccccttccggcacgtccagacggctgttcaggggatggttgtaggccagtgaggagggtctttccaggccggagacgttttcttcacccctcagttccacccttccggccggaaggcccccaagtccacggaacgctccgaagttgcaggaccagtacatcagcgtggccgtgctttccgccgtcacgctgcaccccgccgagctgtagtttcccagggcgccgctttccatgcccgcctcagggcccgaccgggccagcgaccgggaaggcggcgttccgccgctgttgtcgcacgtgtctccctcgcagggacacggttcgggttctttcctgccccccggttccgtcggcaccacgtcgatgctgtagttgcagatggaggtgttgccgcttgccggattgtagtcgatgttggtctggctgacttcccagctgtaggtgccggaggggagctgcgccccgccggtccccgtgtggtatttgtgcccgccctgctcgcccgccgtctgcgggttttccttcaggtccacctgcgccaccaccttgccgccggagtcctttacttccaggattccccagtcgtccaccccaaggaagagcgagcaggtgccgtagagctttttgccctccgctccttccgggatggtgaatgtcccgtgcgcgctgtatccgtccgccgacgtgctcggcggccccacgttcctttcctcatggatccggatcgcttcaaacggcagcggatcgggctccggagctgcctccatgccccgcctgccgaagctgccgccggctccaaagtaccatttccggtaagcgggaacggcagaacgatgaggcggattcatcaggtattcaagagtcgggggtaatgaaggaagcgaggggtggccgccctttcctgatcgttttatcaatagtatgatctgaagtcggtgtcgatagaattttatttgtatgtttttgattttttataaaagatggtcattattttacacgaaaagataatattataattcttacgttcagtgcattcccttaatagacatcaatgttgtctgtttgttagaaaatgttttcctctcatgctgagcccttgacaggaggccatcccttccgggcatcagtctaattcctgtaatcaatgtttctttctctcgaagaaagatgggggccgtcgctgtcggaagggggcttgcttaggtttcgtccggcattgccaagtacggtctcctggattactgggtgccttccggtgtaacaattttttacgctgcgcgacgatgaggaagcaactgtctggtattttattcctggttcaaggaaatctggtaatgaaaaaactcccgacagccgatgccgccgggagtttttacagagcgtcttaagaaggaatcttctttagaaacagaggccttccttggcgttggcccgcatgaagtcgcggttgaggcgggcgatgttgtccacgctgatgcctttcgggcaggcggcttcacattcatactggttcgtgcagttgccaaagccttccgcttccatctgcttcatcatggccaggacgcgcttggaacgttccggctggccctgcggcagcagattgagatgggcgatcttggcggaggtgaacagcatggcggaagcgtttttacaggaggccacgcaggcgccgcagccgatgcaggcggccgcgtcaaaggcggcgtccgccttcactttttccacggcgatgttgttggcgttcggcgcggaaccggtacgcacgtcaatatagcctccggcggcgatgatgcggtccagggcggagcggtccaccatcaggtcccgcaggattgggaaagccttcgcgcggaagggttcaatccagacggtatcgccgtccttgaacttgcgcatgtgaagctggcaagtggtcacctggcgttccggcccgtggggaatgccgttgatggtcagggagcacatgccgcagatgccttcccggcagtcgtggtcaaaatggatgggttccttgccttccttgaccaggccttcattgacgatgtccagcatttccaggaaggaggcgtccaccggaatgtccttggcggcataggtctcaatgcggcccttggcttcccggttttcctggcgccagaccttgagagtgagattgagtgttttagccatgttataatctttcttttgagtgttaatgtattggctatctttacttgtagctgcggatggcaaggtgcacgttctcgaaggtcagcggttccttgtggagaacaggcaggctgtccacgccagtgtattcccaggcggctacataggcgtattcatcgtcgttgcgcttggcttcgccgtccggcagctggtattccacgcggaagtgggcgccgcaggattcctggcggttcagggcgtcatagcagagcagctgggcgaattccaggaagtcggccacgcggcaggctttttccagttccgcgttgatgccgtccgccgtgccggttacgcgcacgttttcccagaattccttgcggagctggggaatgcgttcaatggcgtgggtcaggctttcttccgtgcgggccatgccgcagtcttcccacatgatgaggcccagttcccggtggaaggagtccaccgtcttggtgcccttcacattcaggagcttgttgatgcgttccttcacttcgtcttccgcagccttgaattccggggcggcggtggtgacggcgccgggcttggtggtcgtcaggtaagcgggcaacgtggcgggaatgacgaagtagccgtcagacaggccctgcatcagggcggaggctcccaggcggttggcgccgtggtcggagaagttggcttcaccgaggacgtgcagccccttcacgttggacatgaggttgtagtccacccacaggccgcccatggtgtagtgggaggcggggtagatcatcatgggcgtttcatgggggtcgtcgtccgtgatttcttcgtacatgtcaaacagattgccgtattggccgtcaatccattcgcggcccatgcgcttgatttcatccgcaaaatccaggaagacgcccttgccggtgacggccacgccgcggccgtcgtcgcaggcttccttggcggcgcgggaggaaatgtcgcgcggagccaggttgccgaaggagggatacttgcgttccaggtagtagtcccgttcttcttcgggaacatcggaaggcttgatttcctttttacggattttttctgcggtttcacgggacttgggcacccagatgcggccactgttgcggagggattccgacatcagcgtcagtttggactggtagtcgcccttgaccggaatgcaggtggggtggatttgcgtgaagcaggggttggcgaagaaggcaccgcgcttgtaggccttgtaggcggcagtgacgttgcagcccatcgcgttggtggacaggaagaacacgttgccgtagccgcccgtgcagagcaggacggtatcccctgcgtaggatttgatttcgccggtaaccagattgcgggtgacgatgcccttggcttcgccgtccaccagcaccagatccatcatttcatggcgggagaacatttcaatgtgtcccttggccacttccttttccagggcctggtaggcacccagcaggagctgctggcccgtctgtccgcgtgcgtagaaggttcgcttgagctgggcgccgccgaaggagcggttgtccagcaggccgccgtattcacggccgaagggaacgccctgggccacacactggtcaataatgttggaggagacttccgccagacggtagacattggcttcacgggcgcggaagtcgccgcctttaacggtgtcgtaaaacaggcggtaaacggagtcgccgtcgttctggtagttcttggctgcgttaatgccgccctgggccgcaatggagtgggcgcggcgggggctgtcctggtagcagaagcatttgacgttgtagccaagttcggcaagcgtggcggcagcggaggcgccagccaggccggaacctaccacaagcaccgtgtacttgcgcttgttgttcggattgatcagtttggactcaagtttgtacttggaccatttgtcctgaatagggccggagggaattttggcatccggcatccagtcgcttacgggaaaattaatcatgactttgagaggagttgatggttatttgatgatacccagaagaaccgagaccggcacggagatgaagcccaggcagataatcgcgccgtaggcgatggcgataaagttgtagaagggccggattttgcgggaatcgacgcccacagtctggaagatggactgtaccccgtggcgcagatggctgaacagcatcagaacggccaggatgtagaaggcggagcaccatacgttggagaatccggtcacgatcatcttgtacacgtcaaaggtttccaccgtaccgtcggaaataaaggtggtgaactgggcggggtcgtatcccacgcgcagggtgtactggtacaggtggtagatcaggaacaccaggacggtcaaaccggtatagatcatgtagcgggaggagagcgttgccttaatggtgttcttgaacacgtagggttcgcgggccgcatggttttccagcttcagctggatggtcagccagacgtggatgatgaagatcaccgcaagccccgcgcggattccccagagggctgcttccggcatggagtgcaggccgtgggcgtaggtgttgatccattcagggcctccgaagatgagaaggttgcctgccaggtgtcccgcaaggaacaagaccaaacataaccccgtcagagccacaatgattttgcggccgatggaggatgtcacgaatgtacatatggtttttactagtgcattcataggcgctctaatgaaataaatgcgtcttcacaggatgcccggttcaagcccggatggcaagcctcttcttgaatttccggcgcttttcggatttttgaaaaaccggggaaagaggttgctgtttatcagtttggaatggttatcattttgttgcctgttccggcttgacgaggctttccgcataggcgtatcgtctgtgcatgaaaagaagtaaaaaggaggtgctggacgcggatttcgcagcggcgcgcgccggcgttctggatgtggccgcatttctggaccgggtggaccgcggggaaggggaggcggatttccgctaccatgccctgatggatgttcttcccctcttgtccgcatccggccccggacgcgtccgggccattctggaagccctttcctacagggataacaccgtgccggaaaccgccgcagccaaagcggcctgcggagccccgaacctcagcaaataagaatgatggctttcatagaacctcatatacatatggtgtgccgcaccacggacgaataccgggccatggcgcaggccggctgcctggcggtaggggaaccggcgttctgggccggttacgaccgttcgtccgcggacggtttccgggattatttcgtacagcttacggaatgcgaacccgccagggcggccaagttcggcatggaccattacacatggctgtgcatcaatcccaaggaggcgcaggacgtggctttcgcgcgggatgtgatgaaactgattccggagttcattgaccggcccaatgtcctcggcatcggggaaatagggctgaaccggaatacttcccatgaaatgactatttttgaagagcatctggatctggcggtgcgcctcaaccagcttgtgctgattcacactccccatctggaagacaagcttaaggggaccgtaatgattctttccgccctgaaaaaccgtccggatctggacccttgccgcgtgctggtggatcactgtgaggaacataccttcccgctggtgaaggaggccggttactgggccgggctgaccctttatcccaccagtaagctgaatcccaagcgggcggcggatattctggaattgtacggaatggaccgtgtctgggccaattccgcggcggactggggggattccgatcccctggcgctgacggccctggcctgcgagctgcgcaggcgcggtttttcccggcaggaaacggaacgtcttctcctggaaaatccggagacattcatgggacagtccccgaagttccggaaagtgtcgtcccgctaattccgcccgaggcgcggcggagggtacggccctctagtccccgtccgggaaaaagacggtgaggacggcgcccaggatgaccgccgcgtcatccagaaggcccagcctgccgattccgtcaaacaggaattcgtcgggagtcaggatgtaggcgccggcggcggccagaaggcatatattccgtttgttgaaaaaacgcggttctccttttctgcttttgaaataccggaacaggcgcagtagcagctgctgtttttgaaggttcatggacgggaacgggggataaaggttcaagctcagccattttcccactccttttccctgtttcggggaaggagtctgttgccgacggacggaaaccgcagcgatccggaccgtgcggggaaatggattgctgaaaggatgggctgttccggatgctgagggaagccgggctttgcatgctccggttccggctgtcccggcatgggaaaaaggggcgtgtacggaagtggggcggggccggaagctcttgaaatgaccctcccgggggagcctgaatgccatttccccgtcaagtgctggccgtgagggtaccgcagcaaatggaagcttcttcccctctgttttttccggcagatgtttgaacggataaggaaaaggccggctcacgattttgtgagccggcctttgaatatagggaggcggacggtacaggcttatgccctgcggcggcgcatcatcagcgcggccagtcccagcaggcccagggaagccgtggcgggttccggaatgctggcgatttcactcatcagttgaccaacttgttcctgggaaaggagggagtcgtggatgtagagctgttcgatggattcagccagtcctgcgtccatgagaatctgatcaatttgctggttgccgaatttcaggccgctgttggaatagtacgtagcgctgtcgccaaaatagatgcgggtgccaagatctccggtgactacggaaatggtcagggacccttccgtgcccagcggggtgtcaacgacgggcccgctgtatgaggtgttgttccataatccctggagtttccggtccatgttcaggcccacgccccagcttacactgctgtttttggcgttaaacagagcggtataggtctccggagtgttgattttggacagatcaagaaccatcgtcacagacataacgtcgcggttgttggtaccgtatccgttgaaggttatcccggataacgtcagattgctgtcgtcagacgtgatggaaacggaatctttcagggtgccgaaatccgccgtttgggaggtaaagtccgaatatcccacgatggagctatccagcagagtggtattcgcggtggcgctcaggctcatgccggccgaaagaatcagggtggataataatttcttcatggtcagtatcttaataaaatgatgcaagattcaatgtatgcacttgcgcttgaataacgaatttggaatccgcaagcaattaaaaatattaagagttagtatattgtatttataattcattgaaaataatgattttttaatatctctggtccttttgtcaagatgacggggcaatctttgttattcattggtttcatgattgatttggcctctttttcattacttgacggattccaaatccgattggggaattccaaattcgctacaagttgccatccaaaaggaataataaatatgaagaaaacactgacatttttaatcgcgatgggaagctttgctgtttcctcggaggcagcgaccgtttttaattattacactcccggtacggataattacaatagtaccatccatgggttttatcttggcctggggtcttcttccctggctccttccgattcctcttctccctcctccctgtccggagagatcagactggacagttttacgctgcgcggagccgccaacaatttgggcgctaatgtcacttacggcttcctggtgctgaatggctccgacaattcggtcatcggctggagcaccaatacgggaactactgcagcagggattaatctgacgttcagtttttcttccctggatggttctcccctgcttcttgacgcggcattgacataccgtttcctggccgtgagccagtccgtgatggacttgatgcaggatacgtctaaaacgtatttatatgctgcggggggaacagccgcccctactgctaacacggaaggagataccgtaacgatcagcggcggattgactgctcccggcatccgcggccattatgacgccgagggagcgcctggtgattctgtcgttattacgggagccaacggaaccaatactttcagcttattatccccgattttcacggaaatccgaggggaaatggtgccggaaccagccacggtttccctgggcctgctgggactggccgcgctgatgatgcgccgccgcagggcttgagcttcctgatggcgaaaaatcggcggatgagagctgttcttgcggaacagctcttgttttttatatccagagaggaagaattgcttatccgtatgcgggattcatgccctccggaaggtacggaatttccgggggcagggggccgtatccggttttttcggcatggcggcaatttgctggaaacgtttttgagacgcagtaccggaaagctttttctttaccggaaaatgccgtcaaattcggcagcgcgcttttcgtccatatggtacacggcagctttcacatagcggcctttcaggccggatagggaacccctttgcagctcacagacctggcgggccgccgcatacatattattcgccgtcctattccccggcgctggtatttcggaagaacggcaatgggccccatgcccagcacttcatattcttttccatcgtctgccctgatgacggacgttgcatcaacgatgtttcccgacgatgcggctgccgtggacggcgactgcatccagctccgggatgaaggacggactgacgcgcatgatatggagcaggtaatgttcatggcagccggggacgaaatagttccagaacgcttctctcgtgacatgttccgtttcggcatggtctgaggattgttccgttcttaatgcaatggtcatgaaaggttgttctttacggctcccccttggagaaattccagaggcggtgcatcgtcataatgtccggaatgttcatggggcgcaccacgcggaacccgatcatgcctccgtccgtcaggtaccagatgcttttagggttttgaggatcctgacggttccaggcgggggtgctggcgcggcgcgcagcgcttctcaggctgtccgggtcgtcttcccacgaaccgccgcgaacgatgtgaggggcgccggggatgatgaccaaggggtctttcgcgggcaagccgctccgtttgccgtaggcatccggaacgtaagagtccaaaacccattccgccacatttccgtgcatgtcccggagtccccacttatttggttttttagagcctgttttctggtagcggtcattggagttgttccagtaccaggcgtactggtccagagaggcttccccgtttccgtaagaataggcgccgggggagccggcccggcaggcgtattcccattccgcctccgtgggcaggcggtagtaatgcccggtctgggcgctcagccattcgcagaatttgctggcggcgtggtgggacatggagatggcgggcagaccgtgttcatagccgtggcccatgcccaggttcatggcggtgtagggggcggtaggctgcgtaacggagtcccacagttcgtcatccggctgttcctccagaagctggccgtccttggcgcgcggacgcccgttttccatgaaggccgtataaagttcccaggggatttccgtttccgagatccagaagggggagatgctcactttatgctgcggaccttcgtccggtttccggtgcggctcttccgcgggactccccatgaggaacgttcctcccggtatggcgaccatgcgcagggaagctcccgccgcgggaaccgtttccgtgtaggattcaaaacgtgccggatttccggaagcttcaatgagctgatggatttggcgcgttgtgccgaccagctcccgggacggcaggtcatccggaatgggaagggcaggaccggcagcgcggtccagttcccgtttttgcagcgcggatcggctttctccccactggcgtgcgctggtaatgcgcgcggcatcttccgtggccgggcggggggaattattttcttcccggcacccggccagcagggcgcttcctcccagaaagcaggaaacaaggaaaatgccgcgcatggaatggagaaaaccggaatgccctacatcgtcatgcctccgtcgcaggcaatgacctgcccggtgatgtaacgggcatcgtcagaggcaaggaaggccgtcagggcggcgatatcttccacggaaccttgttctttcaaaggtattttcttaacgatttcttccttgagattgtcgggaatggcattggacatttccgtggagatgaagccgggagcaatggcgttgcacgtgactttgcgcggagcgaattcctgagccagtgatttggtgaaaccgatgaggcccgccttggaagcggcgtaattggcttggccgatgttgccgacgagaccgatgacggagctcatgttgatgatgcgcccggccggggatttcatgagaacgcgctggagggccttgaccgtattgaacgcgcttttcaggttggtgtccagaacggcatcccagtcttcctctttcatgcggagcatcagggagtcccgcgtgatgccggcgttgttcaccaggatgtcaatctgcgggaagtctttcaaaatggcggccatggtttcctgaacggccgcgtaatccgctacgtcgcaggggtaggccttgcaggaatccggaaattccttgttgatttcttctgcggcccccccgcagctggatggactgcggctgatcaggatgaccctggctccttccgaagcgaagcggcgcgcgacggcattgccgattccgcggcccgcgccggtaacgatggctgttttacctgctaacttttgcatgctgcccacagtaaacccgtttttcacggttccggcaagcttgaaatggacttggccgcgcaggaacccatacggggaaggggcgtgccgggaatgaaaaaagaggggggagaaacggggcggggggctactgtccggcctcttcattttcccggagtgcaccggggggcgccccgtcttcatccggttctaccaggtcgctgaattcatccgaattttccaaaatgtcctttaaggcggcggaaccgtaatagcgggcctcaaacaggcgtttgccttcctgcctgcagcggttgtccagcatttccattcgtttttccattttttctatcaaggcgtcttctttctccttttccgcatcgttcaatttatcctgaagctggaggaaatgccggatgtccttctgaatgtcctgcagcgttttgacggcgttgtccgcgctttccttgtcctgaacgcctgccaacgtctgctggatattgatggcaaaggaaaaggcctggttgatcagggattccgcggaaggaattttttccgccggagccgctgctgcgggggaagccgttccggcggccgtttcaccaaatgcaagagaggctccggacagaagcgcagaatataagagaggaacaagaaaagccttcatcctgttcttttaaggcaggatgaaatccacggcaaggaaaaaggggaaactgaaaaaagagccttattccgccgtgatgccgcctttttcatcgtccagaatgcctgacttttccagatagtagtcatatccacctgcgtaggcggtgatggtcccccggttcacatgcagggttttttgtgccagggaacggatgaagtgcacatcgtgggagatgaagaccagtgttccttcataatgcttcagagcctgcaccagggcttctacggacaaaaggtccaggtgggtggtcggctcgtccatcagcaggaggttgggcggatccaccaggaatttgaccaggctgagccgcgatttttccccgccggaaagaacgctgacgcgtttttccacatccagcctccggaacaggaaggaacccaggatggaacgcgcttcttcctcccggatttcagcgctgcatttcatgatttcctccagcacggtattttccggattcaggttttccgttcgcgcctgggagaagtagccgatgcgcgtcgtggtaccgggagtgcgttgtccggagtcaatggggatgatgcccgccagaattttgagaagagtggatttgcccgcgccgttcgggcctacaagaacagtgcgctccccgcgttccaccagcaggtccaggttttcataaaccctgcggtcaccataggattggcagactttttccagctcaatgactttctgggtgctgcgcggaggctgggggaagttgaatttaaatactttcctgcgggctaccggtttttgaatgattttcatcttttccagctgcttgatgcggctctggacttgcccggctttggaattgatggagcggaaacggtcaataaattcctgaatgtgcgctatttccttctgctggttgcggtaggccgcctgaagctgctcgaagcgcacgtccttttgttggaggaagtccgagtaattgccgcggtattccaccagttcttcgttgtcgatgtcgtacacgctttccaccagctcatccatgaaatcccggtcgtgggaaatcatcaggatggctccggggtagtttttcaggtatcgctggagccacagcagggacaggaggtccaggtggttggtaggttcgtccagcatcaggaggtccggctccaggacaaggagtttggccaggtacgcgcgcatgatccagccgccggacatttcccgggcggggcgatggaagtcgctttcccgaaaggccagccctttgagaattttcttggctttgggctccagctggtaaccgttggcggcgttgaaagtgtcaatggcttccgcgtattccggcgtatccgttttgttggcgttttccgccgtccggatggtgtggatggcctgttccatttccggcgtgatgcccagggcgatttccagaacggtttcatccttcggttcgctggcttcctggggaagatagcccacgatggcgtattcatccatgctgatggagccttcgtccggcgtgtcttctcccagaatcatgcggaacagggtggatttgcctgctccgttggggccaaccagagccacccgttccccccagttaatggtcatttccgtttccctgaacaaggtccgtccggcgtgggattttgtgagatttttgatcgtcagcatggtgaagagaggatgtattctaccgggatggaaaggggaaggcaagagccgtcagggcggaggcaggcatttttgaaagctttactggatttttacgcgtagtctgctagccttggcgcgccatgccgaccacgcagacattcaggcttttgcttgctgccgcccttttgtgcggatggagttcctgctgtactcctccggcggaggattatatacaacaaacttacgtgcagcagcaaatgtccgggctggctaatgccttcctggcgctgctgccgccggatcaggcctctcttcccgctgccggagcggaggccaggtggctggcggacacggccgtggtccagtccgcagcgattgcccgggacaacaggactgtgctgtttggctggctgaacaatattctggtcaattccaacctgcgcgacagggggctgtgctggcaggtccagcaggatttgtaccgggacctgcgccgccgccccgtgaagtatttccgcatagggctgacgattcgagaccgaggaacgggcagggagcacagttgcgtgtatgtcaatgccgcggggaagggattgcagggctccattgttctggatgcctggaagaactgcgggcatctggtgacgctgacccagaaggaccgggaaggcggcaaatgggaggaggactggcgggaaccatttgtttccaaggcctttccggagggccattcctacggcatggaacatcacctggtctggcccgggtgggccaggaaacgccccattctggttcagcggatattccagtccgatcagcagaatgaggcgaaggcggccgctgaataaaggggaagcctgatccggcaggaaccggcacacggtgctgcgccgcggcggtttgcggtatcctccgtttttaaggaaaatcccggcgaatcggcaaatggcggagggaatccggactcagggcaaataaaaacgcactcagtgcgtacaccgagtgcggattaattggataatttgctagtgttgcagggcaaaaccccgctgcaaacttacttgcccttggcctgcacaaccggagcgggagcaggagcggtggtttgctgttgctgctgctgctgggagcaggaagcgaccaggcaagcggcgccggcgatggcgaggatagcgatgttcttcataattcgaattaaatacagtgtttgttaactactggaacctccgcatccacggaggtttgctggcaccaatgtaaatggtggcaagtagaaatcaagagattttcttgttccatgtcacggcattacagaaaagagcaggacccccggtttctgaagtcctgctctttttgatgcgttatggaaaacggattgtttcaaaaccgttttttgcgcttacaggctgctcccaagctcaatgatagagtagtccccgtccggcctccggtatacgatctggagcacgtctcgccgcgcattcctgtagagtacgaatggcttatcggaaagttccagttccatgatggcttcttccttgtaaagctttttgagattgtagctttctctgtgaatgagcaggggttccgggtcttccggggaatctcctgggtaatccagcacggaatcgtcatataccgtttcatccagcttgcggatagtttcctggtgatggggacggaaattcttcatcaggcgcgttttgtgcttgcgcatgcggcgcatgattttggtgatcgtctcatcaatgcaggcgtacatgtccatcccttccgtggacgcgtcaatggtgatatgatccgagcagaacaggattacctgagaaatcttgcggtcgcgttgcacatcaagcagtactttaacctccataatgcgcgggaaatccaggcggatcccctcaatttttttcgttacgaattcccgaatcgcgtctgtgacttccacgtggcgccccgtgatcgtaatgggtgtgtttacgtttaccttttgcattgtcgtacctctttctagttgatgttaatgcgcggaccccgtccgcacctttcaagatatacagatttgacaatgtttgtcgaggaatcctttctttttttcgcgtgcggggaaaggcacttttctgtttccgtttccatatgccggacctgggcggctctcctacctgttgtgagccaatcaatcggggagcggccgtttccgtttatcgctttccgtcgtcttcggaatacgtttgaacgtctttgtcatacaattgcgggtataaaaaaattatttgaaagtacttgacatgctgcggaaatgccttataacagttgcgcactcctctacagatgctctctaaatcgcgggatggagcagccaggtagctcgtcaggctcataacctgaaggtcgcaggttcaaatcctgctcccgtaaccatttgaaaaccctgcaagttcattgcttgcagggttttttcgttacggatggaaaagcatccggcgagtattgggagtctgttgtttctgggcgtctttttttgacttttcaagctgccgggttatgttaggctgattcgcaatatcttgatacaacatggaattgctcatcattgcctgtttgattttactgaacggcattcttgccatgtctgaacttgccgtcgtttcttctaaaaaaatcaggctcgaagccgaggcgcaacaaggcaacaggctggccgcagccgctttgaagctggttgaccagccggagaggtttttgtctacaatccaggtaggcattactttgatcggtattttgaccggcctgttttccgcggacgtcttgtcagatgatctgggaggttttttctccgggttgggaatgcctgaattttatgccttttatttagcccgtattctggttgtggctgtggtgacttatttgactattgtattcggggaactggtgcccaagagaattggaatgtgtgccccggaagtgatttccaaactggcggccgtgccgatgaaagccttttcttgtgtcgcagcccccttcgtatgggtgctttccaaaagcacagttctcgtatgcaatttgttgggcgtcaggaagatgactgccaaggtgacggaagaggaaatccgcctgatggtccaggaaagcgcccgggacggggatgtgcaggatgtggaacgcaagatcgtggaacgtgtatttaatcttggtgaccgggatttggaatccatcatgactccgcggggggatattgcatggctggatgtcaagatgacgggggaggaaatcgcctcagtcgtgaaccgtttgccttatcataagtatcctgtggctgacggttccctggaccatgtgcagggctttgtttatataagggagttactcggccgtcttcatgacgggcattttacggtgacgcgtttcatgcatgagccggttttctttccggaaacgatgaaagtttacaacgccctggacgaaatgaagaggaggcatctgcagtttggttttgtctgtgacgaattcggcgatgtgaaaggcattgtttccctgcgcgatattctggaagctcttgtggggacgattcaggagccttatgaagagtctgaaatcgtcgttcgggaagatggctcctgtctggtagacggccagtgttcattttacgattttctcgtccattttcaggaagatatgctgtattccaagtatgattacaatacggtcagcgggttaatcctggagaatctggggcatattcctttgaccggggaacgcatggcatgggaaggatttgtgtttgaaatcgtcgatatggatggagccaggattgataagatactggtcacccgtcattccttgtcccggcaccggaatcccggggcggagggaagtctggaggccttgtgacttgttttcccgttttcctgtcctgaagggagcggtattttttgtggaattagagtgggaaacggaaaattttccggttggagaggcgatgacgaaacagccgtgcgagaggttcgttatccgttttagtccttattataaacggataacatgagaaacgtcgccagcaatgtggctgatcgttttttcatgttgttttgttgggatgatctacggtgtttcccttttgatgctgcgttgatttcagtaagcttcattttgtgctttgcctgccgttttcgattgtctgagaggttttctcttttgaatcatgcagtttcaacggaccgtagaaataggaggcggtggctcccccgtcaatcaggaagtccgcgccggtgatgaaagcccccttgccgcccatcagcaattccgctacatgggctatttcatccgccgtaccgggtcttcctgcagggcacttcgcaaacatgtttctgtaaaaatcacctctgggaccgttgaattcatcgattgccagaggggtgactataatgcccggggaaatggagttgatgcgtgcgcctttggcaccccatttgacggcttccgccatgacacgcttgacgttgcagcgtttcgccatctggtaggcatgcagagtgtccttgatattcccgggttggaggagttcgaggttcagcaattcctctgttggagtcatggccagttgttcgtcctgttcggcagtcagagcgggcatgcggtgaccggattggctggagatagttactcccgagccgccggggcaaataactttccccacctcttccagcaatacggcggttccgtagagatccactttaagaatggtttcaacggatgcctggctgggggaaacccccgctgcattgacgagcatggaaatattgccgtacctctgtgcttctgcaatcaaatgcaggatagagtcccgggaagagagatccatctctaaggggatggtgtcaaatccggcctgattcatcgtccgggcaatggcatgcgcgttcccgatatttttgtcgccaatgacgatttttatgccgcttcctattctgcgggcaatggccatgccgatttgcccggctcccgtcaatatcatgacttttttggatagacgttgttccatgggctatgaaatcagttgaaatgaccggtttttattcctagccatatgttatgttcctctagccggacggtatggccctcccgcaaaaagggcaatgcaaaaacggccataggtgatggtattgcaaaatgggtcatatggattgaaaaactgagggggggatgaaagaacccaggcaaaagtcatggcagcatgccgattcttttcagccatgttttgacgcctgcggcattgcccggcatgtcaatcccctcatcatcggcacgtccgggagttgtaatatctcctgggtcaaggtcttctggaagagttgacggaatgtgccgggaatggggcgtaagcctgtaaatttgttgcatggattcgtttaaataagtagtcgcgtcataagtaaagaagggaatgagcgttttccctttcaggtcaaatgcctctaaaaaggtgcaaatcaccatggcaggctgatgccaccagattggagagccgacgaagatagtatcatatttcgccatcagggaggcttcaggcaagttggcgacctttgggcgcaggttttcataagcttcttttttgacacggtcgctgtcgcggtaagggtcggcattgtaggcctcggcggcttcaatccggtagagatccgctccggtcagtttcgcaatttgttccgccaccgctttggtattgcccgttgcggagaaataaacaaccagcggttttcccgcatcttgtccggttctgcggacaacaggcagcccttttgcctgcaacagcgtgttcagctctttccggactgcatctgcttccccggggccgatgttcctggacacgatatcaagcagctggtgcagctgtgcgggtgttatgcccagattcaggcagatgcccatgtgagagcgggccattggttccacaccgcctatggccgcgaggatggatacggtagccaattcgcgttcattataggtcagaacgtcccgttcaaaaatatctgcaaaaaggtgttctttcaggaaacgttccatgaccggggcaaattcggcataggcagctttcggtgcattgacgggaatgccggagatttccgcaagaatggcgcacccgcgatcgtagcggctgcgcttgtcctttgtggggcaggcatcttgtcccggggcatcggctatgcctcgggactttcttttatccagcacggagatgaatgtctgcaaccccctcaggcttcgcggaaacccgcaataggcgtaggaatgcactaaaacttcccggatttcatttatcgtcaatccactgtccaaggcggcattcagggccggctgcagctgatgcaaatcccctctgccggtataggcggcaatggtgatgatgtgtttctgcctggaggtcaattcctggctggaaagggcggaatttgccgccagagccagcacgcacgacatcaggcagaacaggacagacgataaaagtttcatgaacctgggagagcagttttacaggtttttcccgaagaattccgccagctttccgacagcctgatccacgtattccggcacgtagtaggtcttgatatgcgtggcgcccggaatgaggaacaattccttgttgagggttcccgtggcgcggctgtagcattgttccgtcatgtagaaggtgtcggctctgctgcccgccatcatcagcaggggctggttaatcaggtgcataccttcgctcgcgtcaaaggcaaagaggtccatcaggctgcttttggtatagcggaaggtggaattggggtgggcgtggctttgcagataatagtcgtagccgtcccggtagaggtcaaagggcagttgggccgcctgttccggcgttactcctttcatgtctcccacgtattccggctgaccgccttccgcttcgcgctggcgggcggcgcaggcgtcggcaaggcgttcctgcacgctgttgatctgcgagtcgagaaacccgttgcgccggaccaggccggtgttgaacatgctgagcgtggcgactgccttgaaacgcttgtccgtctgtgcggttttcagggtgtagcctcctccgccgcaaatgcccaggatgcccagacgggaggcgtccgctccgggatattgcagcaggatgtctgcggcgcggcggatgtcttccatgcggttggcgggtttgtccgtattgcggggagtccctccgctggccccctggtaggccgcgtcaaatgccaggcagatgtagccctgttccgccatgcgctggctgtaaagtccggccacctgctccttcacgccgccgttgggatgcgccacgacaagggcggggtattttttcgaggcatcatatccggcgggcgtataaacatgggcggcaatttgcagtccgttcagcatataggtgattggatggatgttgacgcggccttccatgttttccgtgacggctccccggtaaaccagcccccagggattggcgttgtggcttttaatgctttttgcttccgtaaatggggattggcgggctggggctgttgaaacgaccggagaatcatttgtgttcatttgctgcgcatttaactggtggttgaaggaaatcagggaaagggctattgaaataatggcgtttgttttcatggcatgtactttgctttctcaagcagttcccattctatcatgaaaggctctcttcccgtcgatagacggattacaggttttgctaccatgattacagatggcggacgcagaaagtaaatgtgcgggggagtgtgcctgtcacctgtcaagtttgttctgccggagccaggcggccatatggtcggcaatgatgttattgtttttatcggacatcagaaaatgcgtatttccccggatgccgattttgggcagttccaccagagcagcatggccgccatgcctgttgacggcctccacaaatttgcgtcccatttgcagacgtacgcgccagttttcccctccaagcttatcggtgacgttttcaggaatataatctccgaagtagaggatgatggggatttgggtgagcttgttgaattcctccgtcggaacggcgatccccttcatcgtgccggtgaggctgggcatgtcttcgggaacctccccttccgggaagacgtaggtgcccggttccagggaaatgatgccgcgcacttccgggttgcggatggccgtcagccagccggggaatccccctgcggagtgagtgaccaggatgcccttgcccacgcgcttgaagagggcgctcagggcatcgagttcttttgtcatatcgtgcgtgccgatatcgggtgtcatttgtcggaaaaactgatccagggaatccttgtccgtagggaactgtactcccgggttgaatgcgggccattcgccgatccggaagatgtcgaaccagaactgctcgtcggcaagcggcctgatggcggtttccgccgtcgttctgcccgcccgtccccgtcctgggaggtcaaccaggtaggtggcgtatcttttgcgcaggaacatgtcattaaagccctcccgtccgtccggtgttgtctgccagcaccgggcggactgtccatagccatgaatgaagattagaggaagcatgcgggcatcggccggtatctggaagtccacggcggcgtggtcggcatggtaactctggccggcttcaactgcttgcccccagccgggaaaacggctgttgtcatatgttcccgggcgttgcagaatgttcccgcccacggcaaaactgccctgccttgcaataagcaggggggcttgttccgcagctggaacaggggggaggcctcccgcctgaatcatggccggaggcgtgaatatcgataagaaaaaggcagggaggattaaccggttttttttcatcatttcatgaaggagactgagttgtcatgcttttgcaagggaggaaaagcgtgatttgttgattaatgggttgatgatttttctgtgatgggacttcctccaaatacgtcggacatgttcatgaaggagagagctgcgtcgatctgccggacttcatccgcggatagtattacatgggctgcctctgcgttttctttcagtctggagaactttcgtgttcccggaatgggaacgatccaggactttttgcagagcatccacgccagggaaatttgtgccggagtggcctgtttttcttccgccagattatggagcaggaggaagagatccttgttggcgtcaaagctttccggtctgaactgaggcatggagctgcggtagtccgtccccggctcaaacgtggaatttaggttgtagcggccggagagcaggccgttggccaggggggagaacgctacaaagccgatgcccagttcttccagtacgggaaaaagggattcatgatagcgcgccatcatggaataacggttctggatggcggtgaccggacatgttacgtgcgcgcgccgtatggcttcctccgttgcttcggaaataccccaatgcgcgattttgccttcacggatcaactcctgcatgacgcccgccacttcctccggcggtacggaatcatccatgcggtgctggtaatacaggccgatgcgttctactcccagccttttaagggaactttccacggattggcggattgtgccggggcgggaatcggtgatcagcgggtatggtccggggcctgccgtgccgctgaaacggattccgaatttggtcgcaataacgatcctgtcccggtagggcgccagcgctttccccagcagttcttcgttgtcgtgggggtgtccgggcgttccgtacacttccgccgtatcaaagaatgtatatcccatatccacggcccgggacaggagttcctccatttcctttttgtctgcgggcgctccgtaggcatggctcattcccatgcagcccaggcctatggctgaaaccttcaggccgcttttgcccagctccctgcatggcatgttttgcccgttaattgttttcatgcttgcaagactaccataggatttctattttttccgatagacggattacaggttttgctaccatgattacaggttcccggaatgagctggatagccggctcccttcctgctatgctccggtcaaaagcagagaaagggcatgggcattattctgaacatggattccgtaggggactacaactcctttttggggcaggaaacgctgcacccgctggtcagcgtcgttgatttttccagggtcccgccgctgcggcatgcccgcaaggcttacgggttctatgccgttttcctgaaagacctgaaatgcggagacctgcggtacggaagacattattatgattaccaggagggaactcttgtcttcgtatctcccggccaggtgctgggcaatgatgacaacggggaatatttccgggtagagggccatgccctcctgttccatcccgatttgctccgcggcacctccctgggacgcaggatgaaggactatacctttttttcctatgacgcttccgagtccctccatatgtcggagagggaaaggaatttattcctgaacggcctgacggagatccgggaggaactggaacggggcgttgaccggcataccaagtccatcgtgacggccaacatcgaagttctcctgaaccactgcatgcgtttttacgaccgccagttcattacccgcgagaatgtgaacagggatgtgctgacggagttcgaacgtctgctggattcctacttcgagggagacaagcctcaggaatggggtctgccctatgtgcagtatttcgcggatgaactgcatctctccgccaactatttcggtgatctcgtcaagaaagagacgggaaaaactccccaggagcatatccatatcaagctggtggacaaagccaaggagctcctttgcgccaccaataaatccgttagtgaaatcgcctatgaactggggttcaagtatccccatcacctgagccgcatgttcaagaagaatacgggattttccccgagcgagttcaggttgtcggcgtgacgcccgctccctgtcgccggacagcctgcggcattctgtctggagcggaacggttcgttccggattgatagccgggccgggaatacagaaaataatcttctgttccgaacggcaataaacaggaatgcatcttttttcagctgttctgttgtccgcggtattcctattggcacatgcaggcagtttccggtgcctagggaatgtattgccgggggtacaataatggcttcagcctgccggattcatattacggttttatgccgtggagaagaaataacgtcatcttggaaaggcaaccttttatgaacaggtattttatgaacgtgtggagcgatcgtgcgccgttactgccgtctttggccttgttacggttgcggacaaagggtatggtgcggcaagataacctgcgatattggacggcatgatgaatgaaagcggtctgctgcccttcaggagacgaccgtttgcattcttcccgcaacgccgttccgctgaataatataaaacactacaataatgggaaactcaatagaccatggcatgttccggaagtccgtcctgctggctttcggattgtccatttccttatcgggcttcgcgcttgccgcatcggaagaaccggtttcggagcaacaggcccaggccgttgaaggcgccagaaaaatcaatcctgccgccgtggaagtgttgcttgacaacaaccgccggatgacgctcgatttttacggagacaatgttttccggattttccgggatgacagaggcggtattatccgagatcccaaggcggaaccggaagcccgcattctggcggacagtccccggaggccggtttcccggctggatgtggaccagcagggcgatgcggttgtcatcactacggggaaggtcaggattgagataaataaaaagacctctcttttcaaggtgatcaatctgaaggatcattccgtggtggtggagcaggcgtcccccgtcctttttggaaagggcaaaaccagcttttccctgaaggcgaagccggacgaatatttttacggcggcggcgtacagaacggccgtttttcccacaagggaaaggtcatttccatagaaaaccagaacagctggacggatggcggagtggcttcccccactcccttttactggtccaccggcgggtacggcgtcatgtggcataccttcaagaaagggcagtatgatttcggctccagggaagagaatctggtgaacctctcgcatgatgaaaattatctggatgtctttttcatggtcagcgacgggccggtcagccttttgagggatttctaccagcttactggcgctcccgttctgctgcccaagttcgccttttaccagggccatctgaacgcctataaccgggattactggaaggaagatgaaaaaggcatcctgtttgaggacgggaaacggtacaaggaaagccagaaggataacggaggcattaaggaatccctgaacggggaattgaataattaccagttttccggccgcgccgtcgtggaccgttacaaggcccatgacatgccgctgggatggcttctgccgaacgacggctacggagccgggtacggccagacggataccctggacggcaatattgcgaatttgaagagcctggcggactacgccaggaaaaacggcgtggaaatcggtttgtggacccagtccgacctgcatcccaagccggaaatcagcgctttgctccagcgcgatatcgtgaaggaagtgcgggacgccggagtgcgcgtgctgaagacggacgtcgcctgggtaggctcgggctattccttcggtctgaacggtattacggacgtagcccagatcatgacttactacgggaataacagccgcccgttcattatttccctggacggctgggccggaacccagcggtatgccggcatttggtcgggcgaccagacgggcggcgtctgggagtatatccgtttccatattcccacctacatcggctccggcctttccgggcagcccaatatctgttcggacatggacggcattttcggcggaaagaacccgttggtgaacgtccgcgatttccagtggaaaacgttcacccccatggaactgaacatggacggctggggagccaatgagaagtatccccatgccttcggggaaccttacacctccatcaaccgatggtacctcaagctcaagtcggaactgcttccgtacgcttacagcattgcggaggaatcagtttccggcctgcccatgatccgggccatgttcctggaatatcccaatccctacacgctggggaaagcgacgcagtaccagttcctctacggcccttacttcctggtggcgcccgtttaccaggaaaccagggcggataaggaggggaatgacgtccgccatggcatttacctgccggaagggcagtggattgattatttcaccggggatttgtatgagggcggcaagatttacaatgatgttgacgctcctttgtggaagctgcccgtgttcgttaaaaacggcgcgatcatccctatggcgaacccgagcaacaatgtctcggaaatcaatcccaatctgcgcatttacgaactttatccgcacggcagcacctcctttgccacgtatgacgacgatggcgtgacggaggaatacagaaccggcaggggcgtccgcactctggtggagtccagggtggacggcaaaaacaacgtgaccgtcactattcatccggcggtgggggatttcgacggtttccagaaaaagaaggccacggaattccgcatcaatgtgacgcagaagccgtccggggtttccgccaaaatcggggaaaacagcatcaacctggcggaagcgaattccctggaggatttcaaatccagggagaatgtttatttttatgaccgggctcccaacctgaacaggttcgcaacgaaaggcagcgattttgaaaaaaaggtgatcgccgggaatccgcaattgctggtgaagctggccgcagcagatatcacggcggcccctacggtgctttccgtggaagggttctggtttgaaccggctgaaaagtaccgcctttcttccggagccctgaccgctcccgccaatgctgcggtgacggaggaaaatgcggcggcctataccctgaagcccacgtgggacgccgtcccgaacgccgatttttatgaaatcgagtttggaggaatgctgtacaccaccatcaagggaacggaattcctgtttgaggatttggaggccgagactccttattccttcaaggtgcgggccgccaaccgggacggccattccgcgtggacggccgtcagcgcgaagacgaaagccaatccgcttgagttcgccattccgggaatcgaaggtgaaacgagcgtggaaaaccagggcagctccctggcgaagctgtttgatttcaaggaaaaggatgtgtggcacacgaagcatgatgcgaaggctgttccgtttgacctggtcatggacctgaaaacgattaacaggcttgagaagtttcattacgttccccgcgaggacggcggcaacggaacgctgctgaaaggcgctgtttattacggcatggaccgggagaactggacgaaggcaggaacgttccagtgggataaaaatggagacgtgaagatattcggcttcaaggatgctcccacggcgcgctatatcaagcttcatgtcacggaaagcgcgggtgattacggctccggcagggaaatctacgttttcaaggttccgggtacggaaagctatttgccgggcgatatcaacaacgacggcaagattgaccggaatgacctgacttcctacatcaactatacgggcctgcggaaaggcgattccgactttgaaggctacatcagtaacggggacatcaacaagaatggccttattgacgcttacgatatttccgtggtagccacccagctggaagacgaagccgaccagccgcaggaagaagccgacaagaaagatgaggaagaggataaggcgggaggggacgacgagaagaaaaaatccgccgaggaggcaaagaagaaagtccgcgtggacggaacgcttttgcttagtgcggataagaaaaggtattccaggggagatgccgtcaaggtgtccgtgaagggccggaacctccggctggtgaatgccctgagcttcgctcttccgtatgaccccaaggatttggaattcgtgggcgtggaggtgaagaacatgaagaacatggagaacctgacgaacgacaggcttcatacgaacgggaccaaggccctgtaccccaccttcgtcaacatcggagacaaagagcctgtggaaggaacctccgaactgtttgtgctgaaattcaaggctcgtcgcgatatgaagttccagccgaagctcacggacggcatggtggtggataaaaagctgaacaccaaaaaattgtaatttaacatcctgatacggctccatgcccggccaaatggcggccgcgcatggagcctgccgttccggcggagtatttccgcagtattcatcgctgtggagcggtgttcttccgcgtgttttggagaatccggacggagcggcgacgcggaaatattttcctgcctcgcgtttccggcggagcgtgacgcaatggggctctcttaacaggcggatgaaccgtttttttctggcgcgaccggtcttttcccttatgttgggggcgccagacaggccccacgatgctatgaccggccccggactcatctccttgttctgctttttaatgacggccgcctattttttgcgcggcgggatgtgtgcgggcgccgttttgtgcatgggcctggcgtttttttcattttcccgtcgcggctggcttcgcaggagcgtcacgtttctgctgcaggcttccctgcttttctggggggcggaagcctggcgtctggccaggctgtggatgatggaaggggggcctttcctgctctggacttccattccggctgctgcgctgttgcttcatgcggcggccattctatggcggaggcgcggagaaaagaatttgcccgttccggagctggcccgcagccgcgtattttccgtttccgtattgcttctgtttttgctggatgcgctggttcctttccgtttgctgatgggggagcgcatcttgccgtggcagggggtcaatgggctggcgattcttctcctggcctggtggggcggctattgcgcggaaggtttgttgaatccgcagacgtctccacgcaggcggcaggtgatgtggaccgtgtttgcctccgctttttttctccagtttctgctgggagtgacggtggcttcctccctgctgatgacggggaagctccatattcccgtgccgtttatgatgatttccggcccggtttaccgggaagaagggtttttcatgctggcattgttcagcgtatccgtccttatggccgggagttcctggtgcagccatttgtgctacttcggggtgtgggactgcctggccgccgcttcttcccgcaggaaggggcatccggtgccgggtgggaaaaaagcctgtgactggaggtggttttcccttgccgcggcggtggggattcccctccttttgtccgtgtggggcgttccgctggggtatgccctggcggcggcgttcgccgtagctttcacggctccatttgcctggaagaaaagttccgaaaacggtgtgcgggaatattgcagcaggttctgccccatggggctgaccgccagtttgctgggcaggctgtccccgtggcgcatgcgcgtcagggagacatgcaccgggtgcatgcggtgcgcctccgcctgccgtgatctcgccatctcgcgcgggggcgaggcctgccgcatttcccggcgctgcaccttgtgccgcgactgtatttcccggtgtccgcatggcgctttgagcctcggcatggccggccccttttcctctgtgccgtccgtgcgggcggatatgtattttgtaacgctggtttccgtcatgcatgtggtcttcctggccacggctcgaatctgattttatgttgccatgaaagatttctgctccctggagtatccgttttgcggaggatggatggcatctgtccattaggaggctttttcagggctgccgtcagagggattcaggcagcggtgcaggagggggacggccctgaattcatggaacggcatggttccctcttcccatccgaaagagtggattttggtttcagaaggtcatttttgttattcattgagagatttattgatgatttaaagtttttgttatgatttttgaatgaccgttcaatttattaaagtcactaaaaaagatagggtctgctatgctccggtgccggagccgttggaagagggggataagctggaaatcatggaaatgaaggatgaagcccttttcccgccggcagggaaaaacgcaaggatttccctatccaggaatcccatggtattcgtgaaaatgaatgacggattccagcgcatcctgatgaagaatatcctgtatgtggaggcgggcggaagttattgcacgctgcacgtgcacggcatgccggctatcctggtatccgctccgctggcgcgggtatccgagcatctggatggggaatattttatccgcgtgcaccgttcctacctggttaacaagctgcatatagaatccattgcgggcaacttcctccaggtgggcgtcgttgccattcccatcagcaaattcatgaagaaaaaagtgctgggcagtttgaacatgctgtcgttttccaaataagttccggcctgccgcacgggctcctgcggcgttccgggaaagcgaaatggaacggccggaaaggcgggatggaagcagaaacggaatggccgcatcattcacgacgtcgccggaaggcggcatatcaatgaatctaaaccagaaatagaaattaaatatatggcaattgacagatcagcagcagaagcggcgacttcctccctgcagtcgctgcctttcggcaacatcatcggcggtcccctggtcgcctgtgtggaagcacaggcccaggcggcccggacttcctgggaattcatccagaacgtgggcctgtacgcggatggggaagagaagaagacggtgaacgtttccttccagttcatcaaggacggccgcatggctcagattacggttccccttctgaccatcgtccccattccctatatcgccattaactccatcgacattaatttcaaggcgaatatcagcgcgtccgccgccagtacggagacggaaaattcctccagttccgtagataccagcgtttccgcctctgcaaggtgcttttgggcgcgcggcagcatgaatgccagctattccagcaaaaaggactcctctgcgaccagggattccaaatacagcgtggaatacaccatggacgtagccgtccatgccggacaggacagtatgcctgccgggatggccaaggtgctggagatgctgaacaatagcatttccgtcgtttctccggaagggttcctggacgtgcagcatgccatccaggacgacggaaccgtgaaattgataacctcctacaaaaacagggaggggctgtttgacccggaagccatcaccctgcggataggcgaagcgacggaaatatttgaaaacggtgcggggaatgaagccaggattgtgaaaacggattccggcaaggaatacacactttccagggaagacgccagaaactgcacggtgagcgctggagaactcaagaggaaggtggctgtaggcgcctgataaccgaaccatagcgatttctcctccattccagagccatgtcccgtcttaatctcatcgtggaatccctgctgaaggacattattgaagcgcagcatgcggcaaactgccacgcggcatcactggcgcgccagtatgggaagagaggccgtgcgtgcggtttcccgctgcccagcgcccagataggctccctggaattcgatttgaaatatgcggtgacgggaacttccggggtggaggagaaacaggttgcggacacagagcagtggagcctgttccggcaggaattggaagagcgcgtgccgtcgtttgccatccgttccattgtgatggccgtggtgcattccagccttccggacgacgaagcgagaagcgacttctcaagcctgctggccagggaggaacagtggaaaaagaatttctgctcctacctggggaagaaaatttccgcagccgtttccgctcatgagggcgcgctcctgaaggcggaacccgggctggacaggggattgctgctggagcttctggcaggcgtcgcggaaagggaattcatggataatccggagctggaggacctgttccagggaacccggggagaccccctcaggcaggaatgccgcgccaatctccgggaaggcctttcctctttcttggccgctctggcggaaaagtacgtcctcaccaggcaggaaagcagtgtggtggtggatgtggaagtagaggcggacaagctgaaaaagatgccggaggaagccgtgcagaccctgcgcctgaatatatcccctgtttccattccctccgttctggcggagcagaatgatgtttccgggttgtccgcgcaatagtgatagatgatgagtgattctacaaataataacaaggtgaacgggcacattatgagcctgcagcagctgatttcagcgccgctggtcgcaacgattgacgcggatgcgatgtccacggaacgctacatgaagcatttcatgtccctggcctttgagtcctacaatcctgtggacggttccaccggggcgttgaggttgatcagcttcaattttacggacagcgacgcttccggcggcgcggaaaagaaggtcagcgtgccgctcgtcagcctggtgacgctgccgctgctgcaaatcaaacaggcggattttgattttgacatcaatatcattgacgccgtagccgccgcgccgaatgaacatttttccctgaacaggggagaggtggagtcccccggcggaaaagagcgggatgaagggctgaattttcgggcttccctggctccgcagtccgggagaggggcttcttcctccctgcaggcgaacatgaaaatccatgtctccatgcagcaggctgacatgccttccggcctgtcccaatttctccagctggcttccaggccgcattatgaggatgtcccttcccgggaaaagaatgattaattgaaaaaaacgatatggaccagaaaacaacttattcctaccagcgcactccgggccttgactgccccaaatgcggggtgtatttccccacgaccattccggacttgctgtccggctccatcaggtgcccttattgcggcctgacgctttacattgaccggaaagaatcaggccatgccatgcaggccctggaaaatttccagaacgcattagacaagcagcttccctccgcctccctgtcatgaagaaaccgttgattatcctgtccgccgtgctgtgcatggttctgccgtccttgtctccggcggagatgcggcagcgggaaccccgccagcttgccgccgcctggcaggaagtaaagaagcagatagcagacgacgggaaaaccatccgtgtgagggacggcattcaagcgcttgaactcctggcggaactggggatctcttccgttccggcggacggcgtcaggctgtcccgcggcagtctgaccattgtggtcacgcgtgggaagaaagaggacgggattttttacgtgctggctgttaaggaagaagggggcgcaagcctggaagtgaagatggttcctccttcctgatttgccggagaggaaggtcattcattttcaaaatcccacacgcggcggcgggcgtttttcttcgtccgcccgccgttggctttccggaaggggtcaaaaagagagtccagcccgttccctttcagcagcaggcactgttccatcagacggcccagtttccctttcgggaaccctttggcctggaaccaggccagatattcctgggggacgtccatcagcggacatcccttgggcgggtatttggcaggaccgtacatgccgaaagggatatgggtctgcgcgatttcctccaccagttttctcaaatcttccgcatctggtatttcaggatcgttcataggctttgcagaataaatggttgcaggcattccgccagcctttccggcgtttccaggggaagccggtggccggcatgagggatgatgacggcttgccctcctgccatgcgccgcgccagggcgctgaatctggcatcgcgctgtccggcaatccacagctggggaacaggggattgcttcaaaagcgggaccaggttttcctgtgcgcccacggaccagtcaataaaggcgcgggagatggatttgcgccacggtttcagggaagaacggtccggaggcggcggactgccttcaaatacgccctgggcatcccattccttcaaaaaattttcccaggatgcggaaaggcattggacggcccattccgcatccttcgcccgccgcgccgcccgttcctcttcatgttccaggccgggattggcgctaacgaatatggctcctttccagagagggggatgggccaaaacggcctgcatggccaacctgccccccagggaatagccgcagatgaggggatgacgatcctgggaggctatttcggaacaaagcacgcgccccatatccttcaggcttttggggcagcattccagatacctccagaggttcagggcgcgagcctccactcctccggcacgaagaaaatccatgacgggtttccaatccgccggagaacccagattgccgtgcagaagccaaagcatggtcggaaccgtctttctatttgacgccgtagccggcgaggccgttcataaacatctggacggaaatcatgatgagcaccatgcccatcatccgttccaaggcgattgtccctttttctcccagcagacgcaggaacttctgggcgatgaaaagcaccattccggagaggaaccaggcggtcacgatggccccggcataggtcatctgggaaatgctgtccggagtctgggaggcgtgcagcataatgatggacagggaagaggggccggccatcaggggcatggcgatgggaacaatgaagggttcgtcttttccgtccgctcgtccggaagaagaaagcatatccttggcggggaagaccatgcccagcgctacgagaaacagcaggatgcctccggaaatgctcagggtggaaggttccagccccagcaggttcagcaggaattttccggaaaagaagaaaaggagtagcaggctcaacgcaaatacaagctcccgtgtcagaatagccttctgctgggcgggcgagtattttttcagcattccctggatcatgggcgccagacccaccgggtcgatgacgatgaacagaagaataacagtggaaaggaagtcctgcatgggatatgccccgttgtaaacgatacgggcgtgtacgtcaaagggaaccgccagcagtggaaattttctctgcccggattgctattttcttcaccagcgcaggagccgggcctttatgcctggaaagcgatttgagaaattctggggaaactttgcgtaggagaccatagctttttaataaaacagaaaagctattaaggcaaggctccttcgggagaccggctcgatgtttcaaaatctgctttccctacatactcccttcgaacaccgggattcgcaaatccatccttgaatctgacttcaagctcgtacctcttgttattgcgaaggtgctctaaatacgtcagcaacaaataagcttcctggatgggaacttcatgcttttctcccggctgcaacgtaatgaaacgtatggaaaacggtagacgttcaactgtatacaggggactataccaagctaaaggcttctttccatcgcttattacgctccctatacacccaattcttttctcgccttcctttcgccatatttcgatgtggatattagggctatgatccttcaggggataaaagtcgtcgaacaggcgcacggtcttttcgcccttgttcgtgaacaccagcttgaagtcagggaacgtctctctcgcgtcaaactgggtcttttccatcaccacggaacattccactccgttgtcggccatgtccccccacgccgcagcatggagggacaggtttgccagaagtattaaataccggaagatttttttcattgcagcgcgagtttggccgtcgcccggagcatccccaggaaacaatccttaccctgctgattatagtagcgcgtttcgagttcacaagaacattgtttccagccttccagatcgacttcatccaggcataccggaatcgtgacgctgtattcccggccgggggccagttcccggtagttcaagggtcgctggaaggtcatggtgccaatttccctgttcaggatgcggacatctccccgttccgtcctcaatacagtcacgaaaaagtaatcggctgtttcgtcgttgatttcgtccggaatccggacaggctcgtttccttcgttgcggaaggagactgtaatttcgcccttcatgaaattggcagtgtccacaatggagagctgaagaggtgtcgatacctctgcaattgccatactgcgggttttaccttcgttaaccggaggcaagaaacagggcggctcaataataccgggttctgttacatttgtgggtactttgctccatcccttgatttcggctaccctgataagcttgcgggtagtgttattcaggaccttttgtccggcacagtaaggtctgtcacctgggttatccggcaatttttttatgtaagcgataacctctgtcataaagttaatgctagcatttacggctgtcagatccatcgcagctatggcggtttccatatccttaactttatcgcaggaaagagttttctcttccaatttttcctgcaatttcaaatgtttccagtagaatttgtaggcatcttcccattgacggcggtggtgttcttcgtgggcgagagaagcttccgccgtgtgccatatcccaagaccttcaccgctctggtatccgttcaaatcgttaaccgccataatgcagtcctcttcattggtgggaggtgtaagaagggcatcaatgaacgacccggtacgaacaactaccgtagcgccaccagaagcagaaacaacgcgacacctccatacattctcagtttcatccttacaaaccgttacaacgatgttaacaggcgtgttttttgtctgactattaccttcttcttccgtggtaacaggttccggtttctcaaattcaaattccacgtttttggacggttcgcaggtaatggtggattccttttcaatcgtccacaatttgattttgggggacggcgagaattcgcgtttcatcgtcgagttgccttcgtacttcccttcctgaatgggttccctgtccatcgtcacattgaacgcggcagcattgttgctgacgggggtgtaggcattattcgtgtaagacaaggccaccttgtaatagccagctttcaggaacctggcacccgttgccagattcagcttgccgttgggcttcgttccatccttctcacaaagtttctcgttggcaatggagatgctgcctgtgtcgtcggcttccacgccgaaataatacaggccgtcttcctcgaccttgatgaacatttgcggcgctcccgcgcaagtggcgtgctcgcacgccgaaccgtcaaagttgaacgtcatcgcgtcaactccgagtttctgagggatgagagcctgctccccgtcgcagataagcttcgggccgaccgccttgttcagtggtatataattattcatgttcctgaattgtttcttgttcacagaactaaccatttagttctgtgaacaccttgcaggaattccaaaaaaacaacaacacgccccggacgtgatgaaggaaaaatcctcgattatctccaataaaaatggcggatgccatccagcgcccgccatatatatgttaatagtttggaacgtatcgctacgcttgtgtatgaattaagctagaccctacaggggctggtagccccgttcctcctgccggatgagttgcccctccgggatacagactctttacatttccgttttcggaaaaagcggggtttctgaaatacggattcaaggcagtcgggaaaaataatacggaaacgcccggcacggaggcttgtgacgccggacgggcattgaatggtatttccgttcccggagttacagaagaaggtcctggatgttgtccgaggagatgacacccgtttccgtggaggacagtacgcagagggcgtctaccaggttttcctgccccagagccagcccggcttcttccaccagcacatcgtcaatattcagggtagcgatggaaaggggagccgtttccggggcagaaggttccatcagggctgcaatgccgatgacggcagccaccagggccgccgccgcagctccccaaatgcggaaggaatgccgcttgaagtgatgaatggattccaccggaacggcgggagcgcattcttccctttcaatacgcatcatgaccttgcgggcaaaatcgtcccccggcgcaggttgggaggcatggcccagaatctgccagagttttgtatcgtcctgttcgttcatggttgtggttccgctgagggttctatgaagaaaaacaccggaagatgggtccggtttcttgccggtgtcatttttcccgttctgccgcctgtctgatgacgggggccagtacggcggcgatgcgtgcgtaaccggccgcagaagggtgcagtccgtcgctggaaagctcttccgggacgtatccgtcgctattagccatgacgcgtcccggttccgtataaatgaaattttcttccgtggccaggcgattcaggaggagattgatgccggcaatgcgttccgccgtaccttcccgggcgctgttgcgcgggtaaaatccctggaggatgatgacggcttttgccagtttgccggtgatttcccggcagacggcacgaatgccttccaggatttccccgtccgtgttttccgcaaggttgttcgtgcctaggagcaccacgcaaacggcattgtctttcgcaccgtccagttcaccgtggcggagccgccacagggcgttttccacccggtcgtagccgaaccccagattgaccgcccgcattcccgccgtgcacaggttccatgtttccggggatttctgcaaaatgtcccggtgcggttcgtccacgggcgcacctccccagaaatgcgtgatggagtctccgatgaagaggaggttcgggtgtgtttcgcgcacgatgcggcacgcggcttcatgccgggacgcccagtcgtaaatcatgaagtcccggtcctgggtgcagggaatcagcgtggagggtacggcctgggcgggaggagttccgggcatgatgaaggtttccgggggcgtaatgccgcgctttccccggaacaggcggaagcggatgcgcgcgccgggcggggcctgcaccggagccagatagcggccctgcgtgcagagcatgcggggagagtccgcattcacgtctattcggatgacggcttccgggggagcgttcaccgcggtaagtaccagttctcccgcctcattcagggaggcgcggattccggggggtggggatgattctgtcatgagacgtcgcgcatgtgctggcgcatttgcctgcgtccgatggagttcggcccgcggctgtcctgcatgcagtagttcacggggcggctctgggaggcgccgtggggagcgcccaggcgcttgtccggctctgacggcagcagatgcaccactctcttgtttttccagaccagccagagcaccactacggccgccagtgcggagatgtgcaggatgatgccggctacattggccagggcgaaggtcatccaggctttcatcatggcatggagggaggattcttgcgtttcctccggttcctggatggtgatgttggcttccgggatgctggcagggttgtcaggctccagtgcgggaagggtgggcctgggggcggatgccatgtccgcctccgttcttctggccagggaaatcatggcctcaatgagttcgtcctgcggattggtgaatcgggaggcgtcctgcttcacctggtacaggagatccctccgtcccgcatccccaagctgggagctcagctccggatccagtgcgatctgggcgcttttaatatcccccatgtggaaatggagcagcaggttgcgctccttgttcctgaatatctggcgggcgatggtgggagcattgacggaaggggggactttctgcccggccgcgaagatgctgacgaacaggttgacgttgtagcgggatttgatgagcttgataagttcgatgacgtcattgctttccacttccgcaagaagcttctgggggtcaatcaggcctgtggaggtgcggatgtagtccggcaggaaatattcattgacgtccgtaaagtcctccggaatgggatccacggcgggggagtctgcattggcggcgggttccggcatggggtcggagggagccgctgccgcatccacagggggcagcaagggagggttggcattccaccacgcgcctctcatcagggattgctggtcgcggttggtccatttcagggcgggtaattcctgggcgggagccggaaaaatggacgccgccagcaggcatgggaacaaaagggggttcatgcgcctcctcctttccggtcctcgggggtgggaggcattaatccgtagcgcatgggatgcctgactttggagcgcgctttcctggctacgagttggacggcgtttttcatgatggaccccgcagcctggagcagcatgctttcccgcaggggaatgcgggctttcatgatggatttgttgatcaggtccggctctacataagggtccagttcatagccccacatgaagcaggccgtgtccgtgcgcacgtccagcaccagaaccaggagccactggggatccagcggtccctgatggttggggaagccggcctcatccaccgtcaggtggttcatcgtccagaaactgtgcggaataagggaaaagggctccaggatgttggggaaatagacggacaggagaacgggggggatgcggcgttccagtttctccagcagggcattcagcctcatgcggtcctgttgccggagagcgccggcgttgtcgcatacgcggcggtagggtatggcgtctttgccgtattttttgtccaggttttccagagaaaaaccgcagtgagggcacaatgattccgccccgcggtggaaattatgtaaacacttcggacaagtcggcacaaggaaagtttaagcacgaagttcgttgccgaaaagactaattgtcagaaagaaatcatgtatgtctcaatcttccagattttctttcgtgacacggtaaatggcggcgcatctggggcacgtgatttccagctcctcttctccctggaacaggtcttccttgttttcctgaagggtcttgagcgtgggcaggatgcggtccagcgtgcagccgcagtaaaagcggaaccggcgcgtttccagcactcgggtattttcatcttcttccagatgggccattttctcccgggtgagggaagcaagccattcttcatccgcgtcaggctgggccgtcaccatggtgtagcattcatccgggagctcaatgcagcgggcgtttctctgttcgctttgcctgtagaattcctccacccaccgggccggagacgttcccggaatgggtacgacggagtattgcggttcaaaccccttgcggagcagggtggaatacagcgtgttttcttcaggttccttaatgtcctgtgtgaagacgcgccccacgacggattccgtcagggaagaaccggtgacaaacaggttggcgacggcaggcgtccggagattgactgtccaggcatgttgttccgcccagggccgtgcgaccatgtaaagggtgaaataggccatgagttctttcagcaggctgtcgtagagttcttcgttgcgcaggccgtactgcatgaggtgaaggtagtaatccgtaaacagtggagaaaattttgacctgagcgccagacaattgcgtccgcggacaaagatggattcaactgtaatgaattcttctaccagttcttcgctcatgccattcaggttcggtcttcctttgtggaaaatcaaccgttcctcctgtcattagggtctatcatgacaggtaggcgcggcggcggtctttttcccggcatggaaagaggcgcaagagtggctggagggaaatgacggaggggcccggggactgcacgcaataagcctttaccatgcctttccgcgcgtttaacatatacctatggcaactgacaaaaatatcaccatccatacttccaagggcgacatcaagctgacggtgtttgcttccaagacgcccgtgacggcggcttcctttctgaatctggcgtccaggggattttatgacgggctcaaatttcaccgtgtgattccggatttcatgattcagggcggcgatcccaccggcacgggcatgggggggcccggctacaggtttgaagacgagtgccgcccggacctcaggcatgacggccccggcgtgctttccatggcgaacgcgggccccggcaccaacggttcccaattcttcatcacccatgtgcccaccgactggctgaatggcaaacacaccgtcttcggcaaggtgacggaaggtcagagcgtggtggattccattaagcagggagataccatctccggcattacgattgaagataatgcggacgatctgtttacggaacaggccgaccgcattgccgcgtggaacaaggcgcttggtaagtaacctcattccggcattcactcggcggagcgcggcgcggggacgcccgttccgctgttttcctctctctgctttttcagtacatggttctgtctgttcaaaacctgcgtgtgcagtatggcgcgcgcgtcctgttcaatgacctttcctttacagtggaggatggggaaagaattgccctcgcgggccataacggcgcggggaaatccacgctgatgaagtgcatcgccggtttgaatgaaccggattccggctccattatcaaatccaggcattcccaggtgggttatctgccccaggaaggaattcatatccgagggcgcaggctgattgatgaagccatgtccgcctttgcggacctgatggatcttcaggagcgcattgatgtcctgacgcgggaaatggcggggctggatccccgttccgccgcctactctgaagttctcaatgaaatcggggaattggaactggtgctgcatgcccataattccgcccggctgcgtccccggacggaatccatcctgcgcggcctgggattcaaagacagggattttgaccgggattgcggagaattttccggcggctggcaaatgcgcatcgcattagccaaactgctgctccgggagcctgaagtgctgcttctggacgaacctaccaaccatttggacatccagtcccaacggtggatggaacaatatctgcgctcctaccggggcgctatcatccttatttcccatgatgtggcgcttctggatgccctggtttcccgtacgattgctttttaccacggccgggcggaggagtacgcgggcaatttttcctattttctgaaagaaagcgtgctgcggaaggaaattctgctgcgccagaaaaaggctcaggaccgggagattgccaaaacgaaggaatttatcgaccgtttccgttataaagccaccaaggcttctctggttcagtcccgcatcaagcagttggaaaaagtggaactgattgaggtggaagaggatgatgccgtcatgaactttcactttcctgctcctcccgctggcgcccattctgtggtcaggctggaaaaggtttccaaacattatggttccgtttccgtttttgagaatgtggattttgaaatcgtcaagggggaccgcattgccattgtaggagtaaacggggcggggaaatccacattttcccgccttatttccggcggagaggcccccagttccggcagcgtgaccatgggacgccatacgcaggtagcttttttctcccagacgcatgctgatgatctggatccggataaaacgattttggaatgcgtggaagctgccgccacgcgggaatctgcgcccatggtccggaatctgcttggctgtttcctgttccggggggatgacgtacacaagcgcgttggcgtgctttccggaggcgagcgctcccgcgtggcgctggtgtgcatgcttttgcatccggccaatttcctgattctggatgaaccgaccaatcatctggacatccagtcccagcaggtacttcaaaaggctctgtccgaatatccgggttcctactgcatcgtttcccacaaccgcagttttttggatcccatcgtgacgaaagtgctggaatttgtaccgggagagaaaccgcgcgtttacctgggcaatgtttctgattatttggaaaaggtggagagggagcaggccctggctgccgcagccgcctcacccccctccggagcggcggaaccgggcgccggattggatcgcaaggcacgcaggcgcatggaggcggaaatccgtcagaagaagacgcgcctgctgcgtccgcttcaggagaaactggagctgctggaagaagaaatagcgcggctggaaacggaaaagacggaaattacttctcaattggagcgtccggaagtggcggctgatacggaagccgtcatggagcttacctcccgttttcagcagacggaccggcagctggaaacctgtttcacgcaatgggctgatctttcggaaaagattgaagagacggaagcccgcattcaagaagaggcggaaagaaacgtttccggaagctgagaggatttctcaacaaaaaacagggctgtttccgggaacagccctgttcggacagaggaaaaaatcagaacttcaacgcttttccggttatatccggcggcgcagaagcagggcggccatgccaagcaggctgagggaggccgtcgccggctccggtaccgtgtccccctgaagattcaactgggaaagccccaggaaggttcctccggtgttgggagccttggcattcacggtgagggtaaaggtttcccccgcactaactgtgaccggggtattgaagctggcttcctggatatcggccgtcggcgtgccgtctttatcagcctggactcgctcaaagctcaggtcagccgtggcggaggaatctccggcagtcagcgtaacggtagcggttcccgctttagtatccgtattgctatgacgctccccgcttgcattgacgaattgaaaacctaggctgagggaagaaaggacgatgtcctgcgtagctgtgaaggaaaaagtgacagtccaaccggtttcatttccattcatttggaggttgggaacaagaagatccgctgccagattgttggagagggcggtggaaggagtggtgagagtgacggaagcatcttccagaaaatcgctcccagtagtaatgctggtttgatgaaactgggtttcatacagagtggacgccgcctgtactccggaaatacacaataaaaatgttgaaatgaaaagaagactcttcatagctccatgttagcggattagatatccggtgacaacaaaattttttgaagaaaaacgagtttcaccacgggaaaagaggaaaaatttggaaagtgtttaatacacaataaaattttattttcataaatcattagtaatgtgtgtatttatccattcccattttcctatcctctgtcaccggatatctaatccggaggcaatctttcctgcggagtaataaatgaatatttgtccgctgcggaaaatcatcagcctgacatggcctggaagggtttccgcccatttccatgcaaggggaaaaatagacggaaccggcccgggagaaaccggctttctttcaggatagccttttcttcccgcttttccgtgttttttttctgtactctgaaatcgtgacgccgcacagggtaagcagaatccccgccagggatatccaggtcaggcgttcccccagaatgatggctgaggccaccacggttacgaccggtatcatgtaaatgtaaacgctggatttgacggctcccagaatttccaccacgcggttccaggtcagaaagcacagtgcggaggcgaacagacccagatacagcagattgatggcattgacgggttttgccatcaggcgccagtccatgtttgcaggaaggacccacagggcgggaatcatcagtgcaatgccatagaagaaaatgcggcgcgtgcagatgatcatgttggatgtgttgacgccgatttttttcatcaggatggaatacgccgcccagacgaaggccgcgcccagtgccaggatatcccccgccggattcagttccagaacgaaggctccgtttgccatgataaggaagatacctgtaaaggcagcggaaaaacccaggaagaaacggcgtgaaaagccttcccccttcagcaggaaatgggccagaagggctgtgaagaaaggaaccacggctacgataatgcccacattggaggcgaaggtataggtcagggcgatgttttccagcaggaagtacagggtaaccccggtcaatcccgctccggcgaacagaagctcctttttccagccggagaatggaagaacccgcggtttcaggcaccagaggaaggcatatcctatcacaaagcgggtaaagagaaccgtaacgggggtgaaatcccgcaagagcaccttggtggagacgaaagtggttccccagatgataatggtcatgagggcggcggcatggcccagggtgcgctgtcgggaactcattaaattgacgatgtgggggaggaaggcgtttccagcgtcagtcccaggatttccgccggttccgtattcctgttccagacggcatggagaacgccgccgggaacgagctgggattcgtactcgtgaaccgttctttcttctccgtcaagcatgacagaaatcgttccacgggtgacaatgaataaatgagcgtgggcatggcggtgcggggaaagggggccgccgccgccgggggctattttggcgaaggctccgcctctcaggattccctgcctgtccatgaacaggttcctggccgtgaagcccgtatgattgggaatagaggaaaaggcgtccatttgtttatttgcgtgccaggtcgtatccgtccttgcggtctttaatgacccagcccagcgctgccacttccgccctcaggcggtcggcttccgtccagtcccggttctgcttggcctgccagcgctgatccgccagggtgcggatttcttccggggcttcctcctgtccctcctccggcagaataatgccgaaggcggccagaataaagtggaaggcattccgcaggcgggccgcctcctccggtgaaagggaggggatatccgcctttctgatggcgctgaaaacatggcccagggcttccggagtgttcaggtcatcgttcaggctgtcccatgccggctggaaaatccccaattccgggaatgccgcgcagaattcctcataggagggaacggaatccgttccggaggcgttcctgagctgcatatcgaatttggacaggcggttcagcgcggctttagcgtcttccagagaggaaagggtgaaattcaacggacggcggtaatagccccccgccagcacgtaccggaccgcggacggcctgtggcccagtttgttcaaatccgccagcgtgtacatgttgcccagggatttggacatcttgcctccgtccaccagcaggtgcgtgatgtggaaccacaggcgcgcgaagccgccgccgcaggcgcagcgggactgggccacttcgttttcatggtgggggaataccagatccacgccgccggagtggagatcaaagtcattgccgaagtatttatggatcatggcggagcattccaggtgccagccggggcggccttctccccagggagagggccagaagttgtttccgtcttccggcctgcggctcttccacagcacgaagtctgccacggagtctttttcatattcgtctgcgttggaccgggtattggcggtttttcctaaatccagttcacgttcgtccaggtgggaaagccttccgtattccgggaaggaagaaattctgaaatacacggaaccgtcttccgagacataggcatggcccttttccaccagtgtttgaaccatccgtatttgttcgggaatatggcccacggcggagggttccgcatggggaggcaggcaattaagggcggcacagtcccggtggaacagatccgcccagcctgcggtgaattccgccagagaaacgccagccttttgagaatcccggatagttttgtcgtccacatccgtcagattgcggatatgcgtggtgggcaccccccccagttccaggacgcggcggaagacgtcctgcatcacgaaagtgcggaaattgccgatgtgggcagggccgtacaccgtggggccgcaacagtaaaagcgcagtgtttttccatccatgggagaaatgtcctgggccgttctggtgcgggtatcgtaaaggtgtaacatggcggaacgattagaagggaagagggcttcccggtcaagcgggaaaagaaagccggggatccgcggttgtccgcgtccccggctttgaagaaatcataggatggcgagagaaagggaaacgctatttgtccgcgttttgctggccctttttataattctcgttaatacgttcgatttcctcctgggtgatgaatttttcccggtagggtttgttttccacagtgcgttccagagtatagccgaaacgcttctggaaatgtttcttgtgggtttccattttcttttcaaactcttccaggcttggacggttcttgtggctgccccacgcggtttcggaaacagccatggcgcgggggtaggtcatgtacatcagcaattcgccggagggaatccattccgcccacatgcagaggttgattcccttgatgtgcttgacgtcattcttgtcccgtccgttgcggggatcgaagttgtagcagtctttcagcaggatgggagctccgccgggccgggcgcgcacgtcgtccgccgggaatttcatctgggtacgcgccagataatacttgaactggggggtgacgatgaggtcgatgccctgttccttcgtcttatcaatgcaacgcgggaattctcccggcagccaggacatgacggtttcccccttgtggtaatagctcttgttgatgtcataccacaggatgggctttttccggtgcttggcgagcatggccgttaggcttttcgtgaaatcgctcatctgggcttccacattatccccctggccctttttggctcgggcggcctggcagtccgggcacttcttccagtcccccatggggcattcgtcaccgccgatgtggatgtacgggaaagggaatatctgctggacggtattgaaggtatccttaagaaactttttagtggccggtttctgcgggcaaatcagcttggaggaaacaccgccgtgcgtccatacctgggcccgtttggtgttgcagcagaattcgggataggacgcggccagggccatgttatgacccggcatttccacttccggcagtacctggataccgcgcactttgcagtaggctaccaggtcctggagctccttcttggtatacataccttcattggccagcagggagttgttctggctttccggagcggaggggcggacggcgccgatggtgcggagcttgtcgtagcccggcacggggagacgccagccctggtcttccgtcagatggagatgcaggacgttgtatttgtaataatgcatggcgtccacaaaattgtagatctccttcatgggatagtggtagcggcctacgtcaaccatcatgccgcgccagccgaagtcgggggaatcctggatgctgccgcagggaagtccctcaggagtatccgaaagctggtcctggagctggaacagggtcgccatggccatggccttcccgttgggcgtggtataacggagttccacgccgccgggcgtcagtttcatggcatacccttcattgcccagtccggcgactttttgctcatggacgattttgaggtttttggtagttccggaagttgtcgtcacgttgacgggctccggaataatgttgtagggattggttccggcccagcagagggagcccaggaacgctgcggctagcaaaattgatttcatgcggcgtgtatggtaatggttgttgtttgtgtgaggatttaaaccctgtccctccgtcgtcaatggcgtgttccggacaaccgtgtttcgggaggaacggtgaatggcggcgtcaatctctggagggagcgcagtcccactgcggcttgacggccagtttgccggtggccccggggaagccttccggtacctggcagtctttgcggagcttgccgtacagggctttgagctctttcacggtttccgcatattccggtttgttgatgacgttgtgcatttgggccgggtccttctggttgtcaaagagcatccattcgtcgctggtccagatataggacagcgtgtagcggtccgtgcgcaggccatcatggcgcggagcgttgtgttcacccggattttcgtaaaaggcgtagtaaagagaacggtttttgaaatcctgatgttctccggtcttgaacaggggagtgaggctgcggccctggaaggtattcatattttccttggtatttaccccggccacgtcgcagaaagtgggagcataatccagttcttgcaccatggcggaggagcgcacgcccggcctgatgtggcccggccatctcatgatgaggggcatgcggaaggattcttcgaaaatccagcgcttgtcgtacaggccgtgttcgcccatgtagaatccctggtctccgcagtagagcaccagcgtattcctgtccagaccgttctgtttcagatagtccatgatctggccgatgctttcgtccacggaaagaacggtgcccagatagtcttccatataatggcgccagcggcgcagcaaaatgtcgcgctgcgttttgattttcccgtttttaatatctttgacaagctgtacggtacgggccttgtggtagttgtaccaggcttccttctgctgcgggtccatacgcacccattccggcatttcccagtcatactgagtatgcagggtcttggattccgggcaggaaagcattttctggatgtcttcggggaccacctccttgatcaggtgttcgtcagaccatacgttgaaatggttgagcagggtttgttccgtcattttcaggaattccgggcggtctgcaaaatcgtcttccagattggcgggcgggtcaatggcgtccgcatactgtttggcgcggcccagattctgaatggaggggcaccagcaacggtggggtgccttgtggcccacgacgagcatgaagggtttgttcttgtccctctggtccagccatttgaggcttttttgcgtaaccagttccgtggcatagccgggctccgttttcaccacgcgtttgccgtccttgccgggagtgatgaaatccggattgaaatagttgccctggccggggaaaatttcccagtaatcgaatccggtggggtcggattcatatttggacgtatctcccttggcgcccggcggaatggcttccaggtgccacttgccgacaatggccgtctggtaaccggccttttggagcattttcgggaaagtgggctgggaaccgtcaaagggagccgcatgttcgttgaagaggtacccgttcatgtgggaatggcggccagtgtaaatacaggcccgcgaaggtccgcacagggagttggcgcagtagctccggtcaaagaccatgccttcgtccgccagtttgcggaagttcggataaggcatgggagaatccttttcacaggtgcccagggtctggtaggaatggtcgtcggtgacaatgaccacgatattggggcgctggtccggcgtctgcttttgaggctggtccgcggaagcggacagggaacaggccgcaagcatcagggcggtggcggcatgacggttcattgttgaaatcatgaattaaacaggcgaatggttggagggggatgcggcagaatttgtccgcaagggcattcctgccggtccggaaaagaccacatccccgaaagaaaaaacgctggaagagagttttaggaaaaataaaacatcagtttcatatttcaatacaaaaatggggatggagcggaagcccatgaataagccgttccgcagccggacggcaggggaaaagccgttcaggcgccacgtgggccggagcgcttgttccggccgttgttttcatgggattctttctgctccaggagccatgttctgtcttcaaggctgagccttttcagggatgttctgctctggtgcccgtccagctcctgaagccagagagtctgggtcttttccgaataacgggaaagcttggcgaagacggtatttccgttgactcctgtccagacccggtagcctttgggaatcagcgtttttttaaactcttcatattgctgcttcgccagtttgacgctgttcttgatctggtcaaaataaagggcgttttgtccggtataataaccgcgcaacgtatccactttggagccgtccggagacatgaccagaagcacgggcgttcctctcacgccaaacagggagggagcctttttcacatactccagcatcttctggcgcttcctgtaaacaggttcgctttcaaatttttccgcctggtcgtaacagacgcggacgacattccttttcgcccagtcttcaaattccttcgtatggagaagttctgcccccagctttttgctgggagggctgcccacggaatggtggaaccagatgagaatgggttttccggtactctgggcttcccggagggcggtgggatagctttggatccagcgttcgttttccttacgctgggcgaaagcttcttccagcccggggatgggggcgtccgggtcatgagcgtccgtgtaatagacggccccgctgtctgccctggtcatttcctcctgtgtggtggcggtaagatgggtggcctgttgctgattcggagtagtgctcaacagccccgtcggcacattggcgatggaattggtcttgttatcctgcatgtattccgaaaggcttttttttacctttggttcttcctgttccggagaggttcccacgcaggaacagagagccgcggacgcaaacaggagcatggacagcctgggcagactcatgactgacctgatagcataacagggaaaaatgcgcaaccgggaattgttcaacggccgcggcggtttcagtatttcctggcttcctgttccttctgcttccggtcccgtatggcgatatccaggggatgcatgtagcggtcgttgatgtagctcaccctgccggtgcgcagcttcttttcgtaccgtttgccccggtttcccctgaacaggaattcggaccccggaacgcggcccacggtccggtagatcagctcgtcgatttcctcctcttcccggtagccggccagcctgatgtagcattcctcctcccggggatggttggggaagtagtgcaggaggtgtttcatggcccatattcaaacggaaaaatgtataaatccgggaaggaaacagaagaccccgtttggatgccttgagggaagaaaatgggttaatcccccgttttcagcaccttgatgaacgcttcctgcggaatgttgatttttccgatggccttcatgcgctttttgccctccttctgcttttccagaagtttgcgcttgcgggtgacgtccccgccgtagcatttggccgtcacgtccttgcgcatgggggagatgctttcccgggcaatgatctttccgccaatgcaggcctgaatggcgacggtgaagagctggcggggaatgacgtttttcaggcgttccgccagttccctgccgcgggaggctgccttgtcctggtgaacgatcatggagaaagcatccaccggttccccggcgatgagcatgtccattttaatgagcttggcggcctggtagccggcgtattcataatccatggagccgtagccgcgcgtcatggatttgagcttgtcgttgaaatccaccagaatttccgccagagggacggtgcaggtgagcattacgcgcatgtcgtcaatggtctccgtattgtccacgctgccgcgtttttccaggacaagttgcatgatatccccgatgtattccccaggaagcataatgaacaccttgacgataggttcccggatttcctgaatttcctgcggttccgggagcaggctgggattgtccacattgatttcctctccattggtcttggtgacctcataaatcacggaggggtaggtggagatgatatccatgttgaattcccggcgcagacgctcctggataatttccatatggagcaggccaaggaagccgcaacggaacccgaagcccagagctacggaagattccgcctggaaggagaaagcggcgtcattaatctgaagcttcgccatggccgctttcagggcttcaaaatcggaggaatccaccggataaatgccggaaaagaccatgggacggatttccttgaaaccgggcaggggggatgggcaggggcgcatgtaatccgtatatgtgtccccgatcttgacatccgccgcggatttcatgttggcgatgatgtagcctacgtcaccggcttccagggaatccgttcgggtcattttgggagtgaagatacccacttccttcacttcatacacttcgtctgttgcgaaaagtttgactttcatgccgcggtgcacgctgccggaaatgacgcgcacataggagactacgccgcggtaggcgtcgtaaacggaatcgaacaccagggcgcgcagaaggccgtcctgctccgtttcaggcggagggatgcgctgaacaacggcttccagaatatcgtcaatgccgatgcccatcttggcggaggcatggatggcttcctcatgggggatgcagacgatgtcctccagctggcggtacactttgggcaggttggcgctgggaaggtcaatcttattgatgacggggataatggccaggttcagatccatggccaggtgcatgttggcaagtgtctgggcctccactccctgggctgcgtccacaataaggagggctccctcgcatgccgccagggaacgggacacttcataggagaaatccacatggcccggcgtatccagcagattgagcttgtaagtctttccgtccccggccttgtagaaaatggtaacggggtgggacttgatggtgatgcccttttcccgctccaggtccatggcgtccagaagctgatcctgcttctcccgttcggaaatggtattcgtcttttccagcagccggtcggaaagggtggtctttccgtggtcgatgtgagcgataatggagaaattgcgagtcagttcaatggacatggtggtctctacccttctaacatgagtgccctgtgcgcggggagggtaacatagcccatgcggcggtcaagacttgaacatgactgcctcccgttccctgccgcgtcggcttcattcgctccgggaaaaccgtcattcatgacaggggctgcgccgggagattgaacgtgagggaagaaggaaggctctcaaccggtacaggcacgcgaaccttttcccgtgcggtcatttcttacccagccagcatatgaaatcttttttagcagccattttaagcctatttattcccggtctcggccagttgtacaagggccactttgtccaggccatcatctggttcctggtggtgggtgcggcttacggcctcctgtattggttcatctttgcactcgttcctattgtcctgcatatcatttgtattttgcaggcctacttcatggacaatgaatgatgactgccgtttcggcttcacagccaggatggctgaaagggcagcgcatcctgcggattggcagcggcattcattcccagggttgcagaaggaatacgtcgttcatagcggcatcattcttcctcataccggtattttcaatgtttacggggttccatttgttgactgcggaaacgtaaacacaactttttgactttgaattaattaatattttcaggaagcgggctaggggaatcatcctccgataaacaaaaatccagagccgttccggaataattccggaacggctctggagggtcaggaggaaggcctttcgggggtggggggcccctccttgtgttttctttcttgttagaagtcgtagcggtagccgacgcttccgttcagcgcgctggacccgtcacggatgtccgcgttcccgttcacgtagatggttcccttcgttcccaccggcacgctcagtccggctcccagctgcagcgccgtcgttccctctttcgctcccctcacgctttgcgcgaagccggggttgcccagcagagagacgttcgtttcccccctccggtctcccaggtcctgcgccgcgttcactcgaatttccgccagcgcttctcgtccgaagatgttgctgcccaccaggcccatccaccggccgcccagcgccagcgtccccgtcgtccagtcctgcctgccgacgttcaggcccgcgttgcccgcacccgtttcctcatagccgtccatccgcgtcgtcaccaccgaggcgttgaacagcggctgcagcacgctgctgcggttttcgttgaggtacacgtcgtaggtgagttcatacatcgctccaaagccccacccgctggtgcttccctgcgtcccgtagcttccttccccatagttgaccgtacggttgagtttcgcgtcgttccatcctcccgtcaggatgagcgtgtgcgcccagcgcctgtcctggtagcggccgaagaggctggcgtagtagctgtccaggtgcccgtcggcgctgtccgccgcgctggccgtcaggtcgccgtagttggccgtgaaggccgctcccaccgtgaggcggtcgctgaggtccgcgtccacgcccacagtgcctccccaggtggtgagctggtagccgctttcatccccgcgggtgtccagtttggcgtaggagcccgtgccttccatccacatgtggaagcgggggaggtcgtcgttgacgtaggccgggttgacgcccatgagggtggtccggttcctgatccagcccatctggtcgcgcagggcgtccctctgcgccgtcccaagcgcgttgaccgtgctcccagctgccgccgccatggcgcgggaggctccggagaggttgccgtcattgatcatggtgctgacgccgttcatgaattgggccagctgggagtcggggtccaggtttttgcgggcttcccagagcaggctggctccggcggcggagttccacgtgtcggccgcggaggcgaagaggttttcctgccggagtgtggcattgagcaggatgtcgtttccgtcgcggctcagcgtggcgtcctggtagtagacggcgaagaggccggatatccgggcggcgaggctctgcccgtcttccaggccgctgatgctgccggtggcgctcatcaggacgacgtcatggaggtcgctccccgcgttcatggcggcgtttccttccatgttggagaggaggaagccggctccgtcctgcacggtgatggtgcccgccgtcagcatgggggcgccaaagggggcgtcctggttgaagttgtagatcagttccgtcgtggagccgttctggaaggtgatgttttccacgttgagcgtggtgttggcgctgccctgggcgtccccggtggcttcaatacgcagggtgccgttgtttccggcggtgatgctgttgtagttcagcgtgggggcgtccgcggtgcctttcaggaccaggacgcctccgtcacggacggcgaggtcgtagtccttattgccggtttgcaggtattgggtggcttgcccggagatgtccagggtgccgctgcctgccagcgtgccggagaaggttccggaggaggttgttgccgaggagatggagaggcggcctccgttcatggacagggtgccgctgccggagaggctgctgatggtgccggattccgttccggagagggccagcgtgccgtcggcggtgactgaggttccgtccagccgggcttctccgcccagggccagttccgctccttcctggatgcggagggtgccggttccggtgatggagccgtcgtttatttcgcctgttccggtcaggttgagagttccctggatggtcagggagcctccggcttccgtgccggtgatggttccgacttcggcgttgccgttaatggtcaggccgcctccttccagagtgagggtgtccagggtgtttgacgcgccgttgaggacgatgtttccttcacgcagggcgagggtttccacgtccatcgttcctccgaccgtcagcgtcccggttccttccttgatgaaggcgacgttgttgcctcccgtgatgctgccgcccatgacggtgtcctggccggccgggtcgatgtcgtcttctcccgtcgtcatttgtttgttgttgaggatgacgacggccgtgccgtctccggtgttgttgacgaccaggctgctgcccgtggctcccatcaggttgttgattttagctccctgtccgtcggattcgcccggggctccggccaggttgaccgtcagggtctggccgccgccgatgacgacgccggcgtagccggagagcgtttgataggagttgacttcatgggcgtttcctccttcctcctgcacgcggtagaggccggtggccgctccgctgagcaccaggctgcctccgtccgttccggtgacccggatgccgtagttggacagaaggtcggtagtgaaggcgatgtcgcccaggtcgccgacggtcagcgttccgctggtcagggtcaggtagctggaggagtcgtcggttttgtggtccagcagaaggttgacgacggcgtcgttgctcaggtccagcgtcagcccttccccctttatggacaggttcgggtcgcttcccgttccgctgccgttgctgatgacggcgccagacgcctgcgtgtcctggccgatgttttccgttcccagggcgatggtcagtccgtccaggcctccttctcctacggttacggttccgctgactccggtgagacgggagccggaggcgatgttccacgttcctttcatatggctgccgccggcgccggagaggttcaggctgccttccgagatggtgattccttccgtggttccgtcaaggatggtttccgctcctgccgcgtccgccccgagtgtcagggttcccgctcccgttttggtcagggccgggctgtcggtcagcgcgtagatggtggccgaggttcctttctgcgcgatattgatttcatcaaaccgggtgaaggtgacgttttggaagtccccggttccaaaggttcccttgagttccagcgtcctgtttccttctaccgccgctccggcgcttccgccgatggtgatgccgctttcttctccttcctccccaaagatgcttcctcccgtcagcgagacgtggacttcgcctcctaccgtgccacagttgcccgccccgtagatgtctcccaggtaggtgccctgtccaagggtgacggtgatgttgccgccaatgctgacgggcagggctgtgggatcttccgccgtccacgtgcttcctctccaggagccgcccacgattttgcccgtgaaggtggaacctccgtcaatggagacgctggtgtttccgttggtggtcagcgtcgtgccgttgccccagttccagaaggagccgcccatgatgtctcccgtgaaggtgattccttcttttccgctgatggagacgcttgagtttccttccactttttgtacggctccgttgccctcggatttcgtgtttgcgtaactgcctccatagatgtttttgacgaagttgttgtgcccttccgtgccggagagttccgcatcgcctacattaatcgttaccgaggtgctgccctggatggtcgttcctgaagtctggttggccgtccacgcgcttccgcccgtgatgaagttttgggctgtgacgttgccgaagtctcccaggttgacggtcgcgctgttgctgtgctggatgttggtgaccaggacgctcgtgtttcctgtgatggtggtgacggcattgtgggaggaggtgcttcctccgatgatggctcccgccacgatggcgttatctttgacggtaacgttggtgtttcccgtcagggtagtgcttgctcccttgttgttcccgccgatgacgtgttccgccgtggcgtttccagagagctgcacatgggtgtccccagtcagcgtgctggtctggaggttggtgccccattcattggtgacacctccggcgatgatgccgaatgctcctccgttgatgtccatccagatgtccccctggtagttgaggttgccggacggcagggtcgccccgctgttgtataccccggacaggttgattttagttccgccggtgttggtgatttgatagactttgtccccgctggtcgtcagggtcccgttcagatatcccaggctgacgttggccgcactcccctccccaagagccagcgtaaaggcgttcttgaccgtttcttccaattcccctccttctcccgcagatacccacgtcacgctggatatcgccccgtcttctatcgtcagcacgctgccttctattctgtattgccctgtatctaagcctgtaacggtaaaattcgcgccgaggttgcttcctaaatcaaacgtgtatccctgttctccctccaccaggctgtcaagcgcgccgccgatgtcaatggtgcctgaagtgaaagttacattttccttggtaaaggaggatccggattccgtataggttagcttggctccgtcaatggctgcgtttttcaatacgccggtgccgttcatgttcagaacggcatttgcccccagagtggcggaggtgaaatccagcgttcctcccgccatggtgattattccggaataggccagggaagaattattgattttcaagatgccaccttgggccgtgatattcgcgttgatgacggttcccgtcaggttttgcgtacctgttccggccataatcagatttattcctcccgtgggagtagtgttgccgtttactccggaatgctgtgtggttgccccgatacttcccccatacgtgtaatttccgttacccgtcagggtaagattcgctctggaggaattagccgactggacgcgccccttatgtgttccgctgaagccgtcggcatcatttaaaccggccagagaggcggcattggaaatttgtaacgtcagggcgctggaactttgattgattgagcctgacaaatctaccgttgcgttggcgagagccgttcccgtaatctggagaatggcgccgccgggctgcgtccccttctgggaaaggataatgttcccggaaaaactgctttcttgggaaccaagcacaaacttggaggcatagccggcattgccgttagccgctaccagcgttaaatttccttctccggcaaatgccccgttcaaattgatggtacagccgccgttcgcattctgattaatggtaaacgaggagcctgccccgatataaagtcctgtggaataattgttgtttcctgaatttacatcaaggttgacggattggctcccagtaactgaatactcattggcgggctcattgttattaaaggtggagtccgctccccatgcgggggattcagatgttgggacggccagggaaacactggtgtaacaagccagaacagccgccagcagggtaataggcagatggagacgcattgcaaaaatgttagatgttaattttttatgtatataacggattgaaaattcgatgtcaagttgaaaataccagttcccgaattctcatacttttactgtaagtgcattatgattttttaaatttctaaaatgggattttcatcttttcatttacctccccttttgaagcaaggagaggcatactataagactttcattttgaatataaaatatcaaattttatattgcatgggacaatattggaatcatcgccgaattttcaatccgcttttcctttttcgtggaataacgcggagagtccataaaaaaggccgcaccccggaaacggggtgcggcccttgaagtgtgggtggagagaacaggttagcgttcgttgtcgaagttgatggtatcgttcaacatgtcttcggcaagttccgccgcttcttcttcttcgctggccgccgcgatttcttctgcgccctctgcaggttccacttcaatcttgctgtaacgggagaatccggtgccggcgggaatgaggtggcccataatgacgttttccttgaagccttccagagtatcggtcttgccgagggtggatgcttccgtcagaacgcgtgtggtatcctggaaagatgccgcggaaatgaaggattccgtttccagggaggccttcgtgataccgagcagaacgggcttggctgcggccggttggccgccctgggctacggtttgttcattgatgcggtcgaacgtggtcttgtccacttggtctccccacaggaattcggtatttccgggttccgtgatgactaccttgcggagcatctggcgcacgatgatttccacatgcttgtcgttgatttccaccccctggaggcggtacacttcctgaacttcgttaacgaggtgttcctggagacgttccttgccgcagacatccagaatttcttccggagaaacggggccttccgtaagctggtcgcccagatgcacgtggtcgtcttcatgaacgatgacgtgcttgttcatcgggaccagatgatccaccagttcgcccgtgggtgtttcaatggtaataaccttcttgccgcgggaggtattcttgctgctgaggcgcacaatgccttccacgcgtgcaatggtgcaggcgtccttgggcttgcgggcttcgaacaattccgccacgcggggtagaccgccggtgatgtccttcgtcttggctaccttgcggggcgtcttggccaccattgtgccggcggagatggtttctccgtccttcacggtgaggttggcgcctgcgggaatggcatgatgagccagaacttcgcgggtcttggcatcgcggatgaccacctgcgggtgaagttcctgcttgtgttccatcacgacaagggaggaggcaccggtttcccggtccgtttccttggaaacggtgatgccgacgatcatatccttgaattcgacgatgccgcccttttctgcaatcacgggcacattgtacggatcccaggtggcgagggtttcatccttcttgatagtgccgccgttgggcacgtacaggatggtgccgatgacgggctggtaggattccagttcgcggccctgttcgttttcgatgcggacggagcagtttttattcaggacgacgaagttgccgtctgcgttttccaccgtgcggagatcttccgtgtagatgacgcggccgtcgttcttggctttcacgatgggctgcttgaacgccgtggtagccgttccgcccacgtggaacgtacgcatggtgagctgcgtgccgggttcgccgatggactgggcggcaataatgccgaccgcttccccgatcttcacttcctgtccggtggccaggttcaggccgtagcacttggcacagcagccctttttgagttcgcaggtgagtacggagcggattttcagccgttcaatgccgattttttccagttgttccgcctgcttttcgttaatgaggtcgttgatgtctacgataacctcgccgctgacggggtcaacgatgcgttcgcaggaagtccggccgtagatacgggaggaaagggacgccacttcttcgtcgccgtcatagatggcgtgaacggtgatgccgttgctggtgccgcaatcttccgcatggacgatgacatcctgggccacgtccacgagtttgcgggtcatgtagccggagtccgccgttttcagcgcggtgtctgccagacccttgcgggcgccgtgggtggagatgaagtattccagcacggaaaggccttcacggaagttggccgtgatggggcgttcgataatttcgccgctgggtttcgccatcaaaccgcgcatgccggagagctgcttgatctgcgccttgttgcctcgggctccggagtccaccatcatgaagagcgggctggccatcttggagccttcgttgtgttccagcttgcggtacagagccgcctggatgacatccgtagtctgggtccagatgtccaccaccttctggtagcgttccccatccgtgataataccgttcttatactggcgggtcaccttgtccagctccgcataggctttttcaatttccgtctttttctgggagggaaccaccatgtccacgatgccgatggagcagccggaacgggttgcttccttgaagcccaggtttttcagggcgtccagagtctgcacggtacgttccttgccgacggtctggtagcagcgccagatgatgtcgcccatctgtttcttgcctacgttgcggttaatataaccgagttcccggggccagatttcattgaaacgcacgcgtccggcagtagtgatgataaccttcttggtgacatccccatacactacttcggaaggctttttgccgtagtccgggttgtgcaggcggatccagtcatggtagccgattttgcgggcggcaatggcgtattccacctcgtcaatggattcgaagaggggaagatggtgatgattatcctgattgttctgtacttccgcagcacgggtgtgcgtcaggaagtacgcgcccagaataatgtcctgcgtgggtgtggcaatgggtttgccggaagcaggggagaaaatattattgggcgccagcatgagctgccgggcttccatctgcgcttccacggacagaggcacgtgcacagccatctggtcgccgtcgaagtccgcgttgtacgcattacagacgagcgggtgcagacggatggcggaaccttcaatcagaaccggttcaaaagcttggatggagaggcggtgcagggtgggcgcgcggttgagcatgaccgggtggcccttggtcacttcttccagaatatcccacacttccggcgtcttgcggtcaatgagcttcttggcggagcgcaccgtgtgcacgtaacccagctctttcagacggtggatgatgaagggttcaaacagaatgagcgccatcttcttgggaagaccgcactggttgagtttcaattccgggccgatgacgataacggagcggccggagtagtccacgcgcttgccgagcaggttctggcggaaacggcctcccttgcccttcagcatgtcggagagggatttgagggggcggttgccggcgccggtgacggcacggccgtggcggccgttgtcaaacagggcatccacggcttcctgaagcatgcgtttttcattacggatgatgacttccggagttttgaggctcaggagggttttcaggcggttgttgcggttgatgacgcggcggtacaggtcattcaggtcggacgttgcgaaacggccgccttccagaggaaccagcgggcgcaggtccggaggaatgacgggcagaacgttcaaaatcatccattccgggcgtgtgttggactgaaggaacccctgggccagtttcagacgcttggcaatcttgcgtttgttctgtttggagttggtattgtccagctgttcctgaagatccgcgacgagggtgggcagatcaatggccgccagcattttctggatggcttccgcgcccatgccggcttcaaagctgtcatagccgtattcgtcttccgcattgcggaattcttcttccgtcaggatggcccccttttccagaggggtactgccgggatctaccacgatgtagtcttcatagtaaatcacgcgttccaaatggcgggctgtcatgtccagcataaggccaatgcggctgggcatgcatttgtaaaaccagatatgggaaaccggaacggccagttcaatatggcccattcgttcgcggcgcacgcgcgcgttggttacttccacgccgcagcggtcgcaggtgatgcccttatgcttgatgcgcttgtacttgccgcaggcgcattccatgtctcgggtgggcccgaagatgcgttcgcagaacaggccgcctttttccggcttgaacgtgcggtagttgatggtttccgggttgacgacttcaccgaatgaccagctgcggatggtatccggatccgccacggtgatggcaacctggtcaaaggtccggggcttgtcgctcaggccgtgcatttccctgatggtgggggtgtcagacatatattgaaagtttaaaggatgtttgatgcccgcccccgcgttttgcggcacgggggcggaatgcggtggatattagaatttgaggtcggagaagtcgacgtccgccaggccggccatgtcgtcgctgtcaaagccttccgtcatgccgtccacgggagtgagatccgtgccgccgagttgcagggagggttgttcatccttgctgccggggcgtacgttcagccccagggactgcatttccttcatcagaacgttgaaagattccggagttccggcttccagggtattatcccccttcacgatggattcgtaaatgcgggtacggccctgaacgtcgtcggacttgacggtgagaagttcctggagggtataggcggcgccataggcttccagtgcccacacttccatttccccgaaacgctgaccgccgtattgggccttgccgcccagaggctgctgcgtgaccaggctgtacggacccacggcgcgggcgtgaatcttgtccgccaccaggtggttcagtttgagcatgtaggtctggcctaccaccaccgggttatggaaaggttcgccggtcaggccgtcataaagggtactcttccctcccacggtgccgtccttgccgtcaccgatccaggtgaaaccgtccaccttcttggcttcggacatgtaattccagatggtttcttcactgatcccgtcgaacaccggggtagccaccttgaagccaagggccctggcagcgatgccgaggtgggcttcaagcacctgccccacattcattcgggaaggcacgcccaaggggttcagaacgatatccaccggagtaccgtccgcgaggaagggcatatcctgttccgggacgattttggcaacgacgcctttgttgccgtggcgaccggccatcttgtcacccacgccgagcttgcgcttggcggcgatatatactttaacttccttcagtccgccgggttcggattcgtccccggattccatctgatccagcctgtgttcccgttcgtcatccagttccgtaaagcggccttcaaacgaagtgatgatttccagaatcttgttgcgaatcgggctgggttcgatttcgatgtggtcgtgaaccagggccagtttacgcaacagggtcttggtgattttcctgttggccgggatgatgatttcaccggtctgttcattgacgacgtccagcgggattttttcacccagaagaatatcggagagcttcttggtcaactggtcaatgagctgctccttcttctttttatgttcgtcgttgattttcttgaactgctttttcttttccgcgctgtctacgacgaggtcgccgcggtggtggccggagcctgtggaagaaatgcgcacatccatcacgatgccggtgcagccggaggggacacggagtgaggtatctttcacttctgcggccttttcaccgaaaatggcgcggaggagacgttcttccggagccagttccgtttccgatttgggggtgattttgccgacgaggatgtcgccgggcttcacttccgcgccgatgcggatgacgccgtcatgatccaggtttttcagggcttcatcaccggcgttcgggatatcacgggtgatttcttccggacccagcttggtgtcacgggcctgaacttcaaactcggagatatgaatggaagtgaaggtgtcttccttcacggttttttcggagatgacaatagcgtcttcgaagttgtaaccgttccacggcatataggccaccagaacattgcggccgagggccagttcgccctggtccgtgttcgggccgtccgccagcacgtcgccggttttgattttgtcgccgcggcgcacgatcggacgctggttgatgcaggttccggcattggaacgcatgaacttgcgcaggggatagacgtaaacgccattgtcgcggtccgtgcgcacactgtcgggatcggacaggaatacttccggacgcacgggcagttccccgtctttcgtggtgataatgacttcagccgtggcggaggccacgatgccgtccgcttccgccagaacgacggaacgggagtccctggcgcactttccttcgatgccggttcccacgtatggagattccgctaccatcagaggcacgccctggcgctgcatgttggagcccatcagggcgcggttggcgtcgtcatgttccaggaaggggataagaccggcggcgatagaaacgagctgcttgggagaaacgtccatgtaatgcacgtctgccggatccacttcgatgaattcgcctttttcacgggcggttacgcgggaggtcgtgaagttgccctgttcgtccagcgggttattggcctgggcgatgagatagccttcttcctgatcggcggtgacgtattcgatggtattggtgaccctaccgttttccaccttgcggtaaggcgtttcaatgaatccgaattcattgatgcgggcgtaggtacacatggagttgatcaggccgatgttgggaccttccggcgtttcaatggggcaaatgcgcccgtagtgggaggggtgtacgtcccggacttcaaatccggcccggtcacggttcaggccgccgggccccagggcggaaagacggcgcttgtgcgtcaattccgcgagggggttgatctggtccatgaattgggagagctgggagcggccgaagaagtcgcgcacgacggcgctgagggccttcggattgatgagtttgctgggcgtgacgccttcaatgttctggtcaatgagggtcatgcgttccttgaccaagcgctcggtgcgggcaaggcctacgcggcattgattggccatgagttcgcctacggcacgtacgcggcggctgcccaggtggtcgatgtcgtccaccatgccttcgcccttcttgaggcgcaggaggtatttgagggcggccaggaaatcttccgccgtcatcaggcgctggtccaggctggtgtccagcccgagtttctggttgattttgtagcgccccacgcgggtgaggtcgtatttcttgggatcgtcaaaaagcctcttaagcagggtgcgtgcctgagcggcagtagcgggatctccgggacgcaggcgtttgtagatttccttgagggcggattcttcgtcgtgagcgggatccttcttcagggttttgatcagcacgtcgtcctcgctctggtcaatgacgtcgattttcttgatgccgaactggaggagctggcgaaccacacccatattgagctgttcgaaagccttggcaagaaccaggtccttgtccttgatcgtgtccacagccacaaggttgtgcagatcttcttccgtcatgtcttcgctcaggggaagcgtgcggatgttgtagaactggctgacgatgtcacggtccgttttgaagcccaggtagcgcataaacgtcgtcgcaaggaatttgcggcggcggcggcggcggtcaaggtaaacgtaaagcaggtcgttggtgtcaaactggacctccagccaggagccccggtccgggatgatgcggaaggagtggagcagttttccgttcagatgctgggcgctttcaaagcaaatgcccggggaacggtgcagctgggacacaatgacgcgttcggcgccgttaatgacaaaggtgccgcggttggtcatcatggggagttctcccatatagaccgtttcttccttggactcgttgtcggatttgagcttgaaggtgacctgaagggcggcgctgtaggtttctcccgcgcggatggcctcgtaatcgctcatcttcggctgttcaatgtcataggagacgaagtcgagctcaatgttttcgtcatagctcttgataggaaagatttccttcagaacgccttgtaacccgatgtttttcctggccgcggccggcgtgtcctgttgtagaaaatcgaagtatgattgaagttgaatctcaataaggttcggaggttcgatgacttccttgatattcccgaagtagagtcgctttgacatgggctgctgtggcggagatgttatggtttgcatcctgaaaaacccggatgccgggttgggcggttctttccctgggggacggaaccgactggaagcgttttacgaaataaaaggcctctagtcggtcacgcgggatgtgaagacgaggaagcgcaacaggagaaaaacggcttttctcctgttgcgcgggaagtaaaaagcttacttgacgtctaccttggcgccagcttcttccagcttggccttggcggcgttagcttcgtccttggagacagcttccaggatgacggcgggagtgccttcaaccagtttcttggcgtccaccaggccgaggccggccttcacttcgcggacggccttaattacggcaatcttgttggcgccggcttccgtcagaacgacgttgaattcggtcttttcttcttcagcttcggcaggagcggcggcagcgccggcggcagctacgggagcagcggcggaaacgccccacttttcttccagaagcttgacgaggtcggcagcttccaggatggtaagggtgccgagttcttcagcgattttgttaatatcagccattgtattgttttctagtttggtttcgagtcgcgccaagagccaacttggcatttcagttctccggccggagttccgacaaggaacctgtaggagagtcgggtccggttttcacacatttggctagagtgcaaccggaccgtccggtcaaggggttggtattaggcggcgggttcttcgctgccgccgttttctttgtccacatatgcctgaataactcgggcaagagcggaaccggccgcgttgatagtgccaaggagtttggcaagcaactggtcgcggggaggcagttcgccgatggcgcggatttcgtccgcggaaagaatggctccatccaggatcgccaccttgtattcggctttcttggaagccttggcaaaggtgttgatggccttggcggcgcctgctacgtcggatgcgccggtcacgaaagcggtctggccgacgaggtgttccccgatgtcgggaaggccggcatccgtcagagccgtgcgcatgaagttgttcttggctacgtggcactgagcgccgcaggcggccagggcggaacgcagattggtgaactcaggcacggtgatcgaggtgtagtccacgacgatcaggaacggggaggcgttgacgcgagcggtcaggtcgtcaatgatgatacgcttgtcaggattcatggtgtgctaaatcggttcgggttacagtttggcgatggaagcggtgtcaaccggcagaccggggcacatggcgcatgaaacggtgacggattcgatgtaggcgcccttggcggaagccgggcgggccttgacgacggaatcaatcagggcagcgatgttttcggcgatgctttcgttggagaaagacagcttgcctacagcggcggagatattggcgttcttgtcaaccttgtagtcaacgcggccggccttcacttccttcacagccttggccgtatcgtccgtgacggtaccggttttcgggttgggcatcaggccgcgcggacccagtacacgggcaaccttgcgaacctccgtcatggcgtcgggggtggcaatggccgtatcaaagtcaacaaatcctccctggactttcttgatgagatcttcaaaccccacgaattcggctccggcttcctgggcggccttggcggcatcaccctgggcgaagacgaggacgcggacgtttttacccgtgccgttaggcagggaaacgctgccgcgaaccatctggtcggatttgcgggggtccacagtcaggtggaaggagacggtgacggtcgggtcgaatttcggtgccgggaaggatttcatggtttccacggcttccgtgatgctgtagttcttgttaggggtaacaagcttggctgcttcttgatatcgcttgctgcgtttggtagacatgtgtgtatttggcagtgcgttcggactggtttaatcctcctgcggtgagtgttacataccttcgacttcaatgcccatctggcgagcctggccggcaagaatgcgggcggcgcgttcagggtctttcgtgttgaggtcagggagtttggtgttgacaacttccatcagcttggccttggaaagagtggcgactttctttttgttcggttcgccggagccggaggcgacgcctgcggctttcttgagaagcacgctgcccgggggctgcttggtgatgaaagaaaatgacttgtccttgtaaaccgtgatgacggtcggcaggagatcgccggcctgcttttgcgtggcggcgttgaactccttgcagaatgccatgatgtttacaccggcctgaccaagtgccggacccacgggcggggaggggttagcggctccggcattgatctggagcttgatgattttggttatttcttttgccatggttttgctttgttagcggagaaaataaacgggaaggggactgatggggggagacgcaaagaagattcaggctttttccacctgccagtattccaggtccacaggcgtggcgcggccaaaaatggagacactgacacgcagcttgcccttttccgggtcgatttcttcgatggtgccttcctggctctggaacgggccttcgcacacgcgcacagggtcgccgacggcgaattccaccttgggacgggcggcaacggcttccgcatccaacaggggcagaaggtcttccacctcgcgcttgcgcatggggaggggggcgttgcgggagccggcaatgctgatgacaccgtcaatttgctggatgaagtaccaaaggtccttgttcagggtgccgtccgcttccagcaggtacatgttggcataaacatacccgggaaagagtttgctgtgacgttccgtttttttgccgttgcgcacttcggaaataagttccgtggggacttccacccggtaaatgaagtcggaaagctcggcgtccttcgccttgcggataatgcggtcacgaacgctgttttcctgtccggagaggacgtgaaggacataccattgttcgtgaggctctggggtactgggcatgatcggagaaagaagtggggagagtaaaactagattgccaactggatgagatagttgaccacgctgtgaagaaaaatgtcgaacgatgcaacaaacgcgccaaggaataccatggcaatcagtacgacgagagtggaaccccagagttcgcggaattttttgaaacctttcaccttggggtcgctttcccagggccaggtcgtcttcttaagttcgcccttaacttcggcgatgaattgagaaatcttgcgaaacatgcttcaaggtggggtggtgtatttggaaagaagtggcaggtcaggagggactcgaacccccaacttttggttttggagaccaacgctctaccaattgaactactgacctgttggagtctcttctttcgtgggaaatgagggggcctgcggggaggccccctcattaaacctgatgtagattcctctacaagttcctgaggaacttagtcaaggatttcgctgatacgaccagcacccacggtgcggccgccttcgcggatagcgaatcgcatggctttttccatggcgatcggagtgatgagctggacttccaggttgacgttgtcgccgggcatcaccatttccacgccttcgggaagggtgcagcaaccggtcacgtccgttgtacggaagtagaactgcgggcggtagttgttgaagaacggagtgtgacggccgccttcttccttggtcaggacgtaaacttcagccttgaagttcttgtggggcttcacggtgccgggcttgatgattacctggccgcgttcgatgtcttccttcttcaggccgcggaggagcagaccaacgttgtcgccggcctgaccttcgtcaagcagcttacggaacatttcgatgtccgtaacggcggttttctgggtgtccttgatgccgatgatttccacttcttccatcttcttgatgacgccgcgttcgatacggccggtagccacggtgccgcggccggagatggagaatacgtcttccacaggcatgaggaagggctggtccacagggcgttcgggctgcgggatgtaggagtcaacggcggccataagttccatgatggaatcttcggcagcggcgtcgccttccagagccttaacggcggaacccttgataatgggggtgtcgtcgcccgggaattcgtattcgttgagaagttcgcggatttccatttccacgagttcaagaaggtcgggatcgtcaaccaggtcgcacttgttcatgtaaacgacaatggcgggaacgcccacctgacgggcaaggaggatgtgttcgcgggtctgcggcatcgggccgtcggaagcggcaaccacaaggatggcaccgtccatctgggcagcgccggtgatcatgtttttcacatagtcggcgtgtccggggcagtcaacgtgggcatagtggcggttttccgtttcgtattcaacgtgagccgtggagatggtgatgccgcgttcgcgttcttcgggggcggcgtcaatctggtcatagccgcgtgcttcggcgaaacccttcttagcgagcactgaagtaatggcggcggtaagggaggttttgccgtggtcaacgtgaccgatggtgcccacgttcacgtggggcttgttgcgctggaattgctctttagccataatattatgtttaggtttgggctgctatgggtctagcttgaagatggagcttctggcgggaattgaacccgcgacctcatccttaccaaggatgcgctctacccctgagctacagaagcatagacttcttccgcctttcgctgctcctagagaagtcgtaaatccgcccaaacctgcggttctagcggataaatagcatcctcccgtgttgcctgacgaaaagcggacgctatgttacgtttttagatgcgggatgtcaatgaaaacatgaacattttttcagctttatgccgcaaatacagggagtccatgtataatatatttatcaggaatgtgttgaatgtttggatctgtttaaatcctccgtcaatttaagattggggtcaacgtcttcatccagagagtggaacagtcctctgcgggctttgaggcaggtgacataagcgatcatggcggcattatccgtcgtcaggtcgaagtccgggagaaccagttccactttttcacggtcacaggcggttttcaggcgggaacgcaactccctgttgcaggagacgcccccggagatggaaagggtgcggtgaccggaggcgcgcaaggctttcagcgccttgtgaatcaggacgtccgtcacggcccgctggaaagaagcgcagaggtcgcgcagagtttgccggggcaggccgtgaggagcgccgtttttcgtaattttgggcagtgtatagagaacggccgttttcaggccggagaaagatacgttggctgtatgctctttcatcagggcccgggggaaagaaaaggcttccgggtcgccttctgccgccaagcggtcgatttccggccctccgggatagggaaggcctagcattttgcctaccttgtcaaaggcttcccctgctgcgtcgtccagagagcggcccagcaggcggtaattccctacgccgcgcacatccacaaaaagggtgtgacctccggaaacgaccatgcccagatggggaacgggaccgccggggcgtttgaggaagggggaaagcagatggccttccagatgattgacggagacgaagggcctgcccgtcgccagagccagagccttggccgtgctgttgcctaccagaagcgcagctaccaggccggggcctcccgtagcgccgaagacgtcaatgtccgcaggagctgttccggcttcgcggcacgcggtccggatgattccgggaagatccgctgaatggttgcgggaagccagttccggcactacaccgccgtgctggcggtgaatggcaatttgggaggagatgacggaggagagtatttccggagatttttcctctccggcagaacgcaggatggcgactgccgtttcatcacaggaggattctattcccagaacggtaagggattccggcatggaggaagaacagggaggggaggttaggaggactggtggatttgggccggcttgttgccggtaaccgtttccctggtaatggtaacggtgtccgcatttttcatgctgggcactttgtacatgacgtccagcatgagggtttcaaagatggaacgcagagcgcgggctcccgtgccgcgtttcatggcttcggcggccatggctttcagggcgtccggcagcacgtccagtttggcgccgtacatggcgagcagtttggaatattgcttgaccagggcgtttttgggttccgtaagaaggcggatgagctggctttcatccagcttggagagcggacagaagatgggcaggcgtcccacgaattccggaatcatgccgaaggagaagaggtcttccggcatggcctgtgccagtatttcctcttccgagtattccttgcggtcgcgttgttccgtgatggctccgaatcccatctggttggcgccgaggcgtttgcggatgatgtcttccagaccgacgaaagcgccgcccacaatgaagaggattttttccgtattgacgcggatgtattcctgttgcgggtgcttgcggcctccggtgggaggaacattgcagatggtgccttcaatgattttcagcagagcctgctgcacgccttccccggagacgtccctcgtgacggagacattctgtgttttgcgtccaattttgtcgatttcatccacgtagatgatgccttgttccgctttcgctacgtcaaagttggcagcctggagcaggcgcaggatgatgttttccacatcttcccctacgtaaccggcttccgtcagcgtggtggcgtccacaatgcagaatggaacgttgagcattttcgccagtgttttcgccagcagggtttttcctgagccggtggggccggccagcaggatgttggatttttcaatttccacatcgtccagggacttgtcgtccaacatgacagcactttggcgcaggcgcatgtagtggttgtacacggctacggaaagcacttttttggcgtagtcctgaccgatgacatactggttgagcgtagcgcacatttcttccggtgtgggcagcgggccttcataggaggccgggccggccgccgtttccctgagcatgtccgcggctgccgccttgcgggcctccgcctggcacatggcgtaggcggagggttccatgttcaggatgccgcggatgaagcgggtcgccatcggaaggcctgtgtccttcacaatcatgttgacgcaaatttcaacgcaattgttgcagatgtaaaagtcttccgcaatctggatgagtttgtccaccttgttcccgggcttgccgcagcaggaacaggcaggaagatgaggggtggaaccggacatggtttttcaggtagagagagaaatggcggagggaaagggtcaggccttggtttttttcttgtcgccctggtcatcagagtgatgcgccagaactttatccaccaggccgtaggccacggcttcctcggcagtcatgtagttgtcgcggtcagcatccttttcaatttgcttttccgttttaccggtatgtttggccagaatgccgttgaggcgttttttgaggttgaacatgaagccgatggtgcgttccacatctgaagcggttccctgggcacctccggaaacctggtggatcattacgtgggagttcggcaggcagaagcgtttgccgggagttcccgcagccagaaggacggaacccatggaggccgctatgcccaggcaatatgtatttacgtcacaagagacgaattgcatcgtatcgtaaatcgcgagacccgccgtgacggatcctccgggggagttgatgtagacgtggatgtcttttttcgggtcagccatctgaaggaacagaagctgggcaatgacggaattcgccacatcgtcgtcaatagcggagccgatgaagataacgcggtctttcaggagacgggagtaaatgtcaaaggctcgttcgccgcggccgtcctgctccaccaccatgggcacataataggagtttgcgggggttgatttggaagattggtcttgaaacatgtttatggaagattggatgttgttttttcaatgtacgttacccgtccgaaagatgcaaaacgggggagtcgggcatgtgtgcgccaactccccctggtaaggtgttttgtgcagaggaggggttactgctcgtctaccgttactttggcctcttttgtcaggaagtccagaaccttggctgtcagcaggctcattctgatgccatgcacgcggccttcgcgctggagttcgcgaatgtaggatttgaggttctttttctgctggcgggcctggcgggccacttcgttgtaaagctccatttccgtgacggcaattttttccacctgcgccacttcctgaagcatgaagaagaccttgaggttgcgcttggcctcctgtttggcttcttcccgggcttcctccacaaacttatccatgtccgccggggcgttgccgctgtacatggcctgctgcattttctgctggaggatgccgtacacttcacgttctacgacagcttccggaaggttgaagtcaagcatgtccgccagcttttccgtgatctgatcggccttggcctcatcaatttgcatggctttgcgctgggccaggttttccttcagggcggttttcaattcttccaggtttttgccgggaagaactttttccgcaaaagcatcatccatggccggaagctgtttttcccgtacttctttcacagtggcatggaatacgagttccttgccgcgcagttccgtaattgggaaggtatccggaatggtgacggtgatatccttgctgtcaccggcgttcaggccttccagggcggaggcgaagccgggcaggaattgatcgtcttccaccttcatccactggccgtcacggccttccaggaagcctacgggtttgcctacggcttccgctacgggcttgccgtccaacgtggttttgaagtcgataatcgccacgtcgtctttttgggcggcgcggtccacaggggtgaattccgcgatttgttcagccagggagttcagagcttcctctacgtctgcttccgttacttcggaagagggaaccttgacttcgatgcctttgtattccggcaattcaaattcgggaaccacggtcatcgtgctggtagcggtgtagttgccctggtcatccagagattgttccggctttccgaagttgagcactttcaatttggggttttcttccagagcggtggagcaggccgtttcaaaaagggtgtccagcagttcttcttcaatttctttcttgaagcgcttttcaatgatggacttgggtgttttgccggggcggaagccgggaagcttggctttggcggcataggaatctacaatggaggcgcggcgcgcagccgtggtttctgcaggaatggaagctttcagcgtggctgtgcagtccggttgaatatcaacgttgatttccataaataatacggtcagtgttaattgaaagtggttctgtttcagctccgggatggcggcagcggtcaaaacacgagcggcgataactttaatgagagggtatctggagtgcaagctattgcacaggaatgacacaattgccctcctaagcgcgcacgcgcacgcgatgtaatagaatacggggcaactgtgttctacgcggaatcacgtcttgactatgcaagaggaaaagtcctttatatcccaagcattaagttcagcgctcatgattcgtcccgtttttttgtgtgtttcctttcccttgatagcatgttcggctgttttggcccaggatgaaacttcccttaacagaggcgcctatggttccgtgatgactccggaacaggtaatgcgggaactggggccgggcacggggcttcttcccggtgaccaggcgtatgaggggcggcctgtgaagagcgtttccgtgcggtacagaagcaccggcaagaccgtgtccgaagaccgtctgaaaaatttgctggctacgcagccgggcaccagttattccccggaagtggtcaacaaggacttggaacggttgttggaaagcggtctggtaggcggcaatacaacagtagccgtggagccttccggcgacggcgtggcggtggtgtttgaaatggcggcccagaatctgctgggcggcgtggggttccgcggcaatactgcgttcgacaacagggacctctccgaggaatgcgggctgaaggggggggaagctctcagcgacaaggccctgagcagcgctattgccaagctgcgcacttattaccaggaagcccggtatccggatgtacgtgtttcctatttttaccagaaaacggaacggcccggctttgtggatgtggtcttcgacattaacgaaggaaaaaaggccaatattatcaagattgactttgtgggcaatgaacacatcagcgccaaggatctccgacaggtgatgaaaaccaaggagaagggctggttgacctggattaccaaatccggacgcattgaccgtgaacaagtggaggacgatctggcggaattggtgacttattaccgcaataaaggttatctgcgcgtcaagctggacaaggtggaatattttgacgccggcaaaggcaatgagcagaagctgacgatgagaattacccttaccgaggggcgccgctacaaggtcaatcaggttgccttcggccccaccaaggtgtttacggcccaggaactgattcccggcctgagcatgtacaacggggatacctattccgcccagaaagtggccgacgacgtgacgatgatccgccgttattacggttcccgggggtatgcggacgcctccgtgcgtccggacattcaggaagtgggcgttgatcccaagacaggttacggacaaatcaacatcgtgtaccatgtgacggaaggcaatccctaccgcgtaggcaatatccgcctgaccgggaataaccgcacgaaggattacgtcatccgccaggaacttcccctccagtccaatgaccccatgaacgccgtggatttggataccgcccagaagcgcctccagaacctgaactattttgacatggtggacgtagcccaggtgggatccacgcgacccggctaccgtgatatcaacatcgaggtggcggaaaaacgtacggggtccctgaatatcggcgtggcattttcctctattgaaagcgtttacctgttcgctggtatcacccagtccaattttgacatgtatgactggtcctctttcgtgggcggcggccagcgtttcgcgattaacgcccgtgtcggttttgaaacgcaggatgccagtatttcctgggtggatccgtggttcctgcaccgcaagctggccttcgggacggaaattttctacagcaattccacatatttttccgattattacgaccagcagaactatggctttgccatttctctccgcaagccgatcggggaactggattacgtgaaactggaataccgcctggaacagtatcgtattgacgccgaagggaacgcccctatcttcttttggcaacaggacggagactacctgcgcagccatgtggaactttcctacaccattgatacccgcgacgcgcagattttcccccgcaagggaggcaaatttgaagtgctggccggttattccggcctgggcggcgatgtgcatacatacaatttcggcgtgaatggctcctattactggaatttgcgcggagacaccattttcagcatcaatgccggtgcggctaccgtggattcctatggcaaccacgatgtgcccatttttgagcgcctctacctcggcgggccatacaacatgcgcggtttccgtttccgggacgtggcgccgtacaatcccgccctgagcggtgatgagacgatgggcggccgttcctccttcttctgccagtttgaatattccattcctgtgattgaagaagtgcgcgtcgcggtgttttatgacatcggttttgtcaacggagattcttttgacttcagcacgtccaaaatagtttccgactacgggatcggcctgcgcctgaacctgcccatcggtccgctggcagtggactatgccattccgattcagaagaacaacgccattgaccgcggaggacaattccagttctatctcaattattcctattaattacgtttgataatttctctaccgtttgacgacatgagtaatttccgcattcttatcttggcgtttctggtggtggtgctggctgttctgggaatgatttatgtgaatatttcttcaagaatggatgtgattcagcaacagcagcagatggcctccgctccggcacctgtcaatccttccccgtatcttccgatgcccacgcaggctcctgcctccgccgttcagccggtggtggtggcggatcctgtagtgagcgaggaactggctcatgtttcggcggagctggaacggatgaagaaggagaatgaagaactgaagaagcgccatgccctggcggaggaagaacgcgatttgttggaacgccaaaatatggaaaagggagatccccggctgcaatggcttaatgaaatcaaggatgcggagcaggtgggccgtgtgacggaatactaccgtgacgccaacctggtcctgttccagtccatcggccagcctgacttgaaagtggggcaggaactgggaatccgcagacgcgggagcattttcgtatccctgattatcgacggagttgacccggacgggaaggtgttccagtcctacgtgaagcgtaatacgctttttgataataatgacaaggaacccatcaagccgggggatgaagtcattgttccgcctgcgagctggcaggaaaacatgacggaagaatacaagtccggtatggcttctccctccgcccccgtccccgtggaagctcccaaaccggtgatgattcccatggagccgtgattcgggtccgtatttagccaagccaagtaaagagaagtgcacctgagagaaagattgcaatcgggcgccgggcccagcctgtcctttgaatttttcccgcccaaaaacgagcaggcagcgtcggccttgtaccagactatccgtgaactggagccttaccgccccagtttcgtcagcgtgacgtatggcgcagggggctccacccgcgagcttacccgcgaggtggtgttgcgcatccagcatgaatcccgtattcctacggttccccaccttacttgcgtagggcatagccgggaggaggtatggaatatcctggatcaatacgcccgggctggagtgcgggccgttcttgcacttcggggagatcctccccggggagcgaaggattacaaccgcgatgcggatgtttttcgccatgcggcggatctggtgacgtttatccgtgaatataatgaatccggccgtcacccggatccggatggattcgccataggcgtggccggcttcccggaaggtcatccggccactcccaaccgcctgcgcgagatggatttcctgaaagccaaggtggatgccggcgcggattatatctgcacccagctgttttttgacaatcattcttttctggattaccgggaacgctgtctgctggccggcatcaaggtgcctatcctggcgggaattatgcctgtgaccagcctgtctggcatgaaccgcatggcagagctttccgggggcacctgttttccggccaggctgctcaaggcgctgaagcgtgcgggttccaatccggacgctattcaggaggtaggcatccaatacgcctccagccagtgcgccgaactgttggattccgatgtggacggcattcatttttatacgcttaaccagagccgggcaacgcgggagatctacaggaatctgggactgaaggattccctgcagcttttggaacatggcgaagataagtaaaaagctgattgatttggttgggacaacacggtagaaacctcttcaacatattatggatatcaaggatattaaacgggccatggacaatatgccgatgggcgacggaagtgcgtttgcggaaatttccgtcggcccggccaagcatgaacagtttttggatgaacattacggcaaggttgcgctggttgtgttgctatgcgtccttggggctgccggatggattatttataatggcgtgcaggattccatggaaagaaaggcaggcgccgctctggtggccgctatgccggaatccccggcaaccggggaaatttccctggacgaacaggggcttcagcaggtagtggctgactttgacagttcccgcgccgccgtcaccgcctcttaccttcaggccattgccttgtggaacgccggcaaggaggatgaaggcgtggccaaaatgaaagcttttattgattccgctcccacggaggaatggaaagcccaggcttccgttaccctggcctgccgtctgatgaaccgggggaaagcggatgaggcggaagggttgttccgttccgtggtggatgcgggagatcctactttttccggttttgccaccatgtgcctgggggacattgcccgggctaagaaagacaatgccgccgcaggcgccttttaccgtgaactggcggagaaatttccgtccagtgcatttgccttgcagagcggaggctacctgctgcgcaagagcctgtttgatattcagagtcccgttcgtattgagcccgcagtagaacagaaataatccatgcgggcgtttccgaagttttccggaagatgaacgctttttccatccgcatgtctgtttttttacagtgcatgcggatttccgtattcaggaacgccggaacagggggataatgaaaagcctgctgcgcgcgtagctgttatgattccgggaattccgttcaggactgtgacatatttaaacaaatcatcaagggattccgcgcttaccggatgtaaccgggctgccggtgttaatccttattttttatctcatgaacaggcatattaaatcattctggcttcttcccctggcgggaatgacgctttctttcatgccgtcctgcacgacggacagctacgggaacagttccgtaacgcccggtggagccgccgccatcggtgtgggggcgctggctgccggcgccgctattggggcggctgtccagcatgaccgcgacaaggacaggtaccgcaatgactggcgtcaccataatcctcctcctccgcctccccgtccgcctcatcgaccccaatggcggaggtaagaagggagcgtgcgtgtaagggcggcgatatttcggttcggcagggggccgggaggcgacgcgtttttccggtctgcccctttgctgaaatctcagacccgccgtatgccgcggagcgcccaggtcatgcgttgtctggcgctttccggatcattgaggatagaacccagcaagtcgagaacgggccgagctgctttggagtcgtgcacttggagctgtccggaaaggataaagggggctcccccgcagcagacaaggtaaatgaggatgttcatggggtctcccatgagcacggatccttcctgctgggcttcccgtatggtttccagcagcacaaggggatggcgcgtatggattcctgaaatgaaacggatggccgcctgttcccctgccagggcgtccagaaccagctgggcaatgaattggccgtgacgcagcaggaactccatgacgtctcccaggatggcttccagtttttcaaaggccggaagatgaatgttggcatgggtcctgatgccggtgaacagaggttcgtaccagcgttccagaagctcggtcagaaaagcttcccggttgccgaagtgatagacaaagctccctgtattggtgccggcccgcagggacaggccgcgaacggtaagggcgcgcagcccggattccccgacaatcatggcacccgtattgagcaggtgctctctggtggatttccgtttgggcatgaaggtgaagcttgaacttccatgtgtgccccttatcggcctgcaaggcaaggactcgttatgtctgttgctgtaaaaagcggaaccggggctcatcctctccccggttccgccgccggagtcctgaatgaatcaggaggttgctttcaattccttccgccgggaggcaatccagcgggagaagagtttggccgtggccggaatgataagcaggttcaggatggtggctgtcaccagcccgccgaactggacgatggccagggggccgagcagttcgcctccgggctggtcaatggcccagatcagcgggagcagccccagcacggtagtcagggaagtcatgataatggggaccacgcgttccagagaaccctcccgtatggcttccgcgggttccatcccctgatgttccagggcccggtacctgttgagcagaatcaggccgctgcggatggcgaagccgatgacggtcacgaatcccacaatggaagccacggaaagaatgggaggaatgtaagttcctccaaacagggaggacagcgtaccgggggaggcaaggaagacggctacgatgccgcccaccaggcacagcggtatgttcaccagggtcagcatggcgcgccggacgcttcccagtgcggaggaaaggagcagcacgatgagcaccatgacgatggcgcccaggacgtaaagccgttgtgatgcggattcccgtgctttgatagtgccgtcatagtctacggtacagcccatggcgttcattaccgggtccaattgttcccgacaggctttcgcaaggtctcccaggttggaattgggggagggattgcaggaaatcatggctttccgcatggtgttgtccctcaggatgaggttggaaacttcctcccggtatacctgtgccacgtcgtccaggcgcacggtttttttattgggggaaatgagttccaggtttttgacatcttccatggacgttttaagtctggggtcaatgcgcaggacaatgttccaatggtcctggtttttgatgacttctcccagtttttgtccgttcatggccgtggaaacctgttccgcagcattcgccatggtcaggccgtaggaagccagggcttcctgattgtattgcacgcgaatggtatccaccataatttcccggttggcgcgtgcatccgccacttccggcatgttctccagaatttccttggctttccgggccgccaggcggagctggggcagctctgtgccgtaaatgttgatggcgatttccgagttggagccggacagagcggaactgatgcgatgggccagcggatagccgatcatggagctggtgccggggatgccgtcaatgcatttcttgatggcggcgcgcaattctttctggtctttcttcagatccacgcgcacgagcagctcggaggcgctgacgggttctgcgtgttcgtcgttttccgcgcgtcccgtgcgctgggtgacactgagaacccccggaatctgttcaatatctttcatcactttccgggagatgcgctccgtttcatccagggaagttcccggcaccgtgctgacgaagactgtgtagcaatcctcgttgaacggcggcaggaaactggttccgaacgtggaacccagccacagggccagcagtgtaatggccgtcatgatggcgcagaccgttttggaaaagcgcaggcagaattccaggatgggggcataaatgcgtttaatgaggcgggagctgaaggaatccccgctttccagagtagcggcgtttttgcttttcttgaaccatatgtaacagagaaccggagtgatggtgacagctacaataagggaagaaagcagggccagcatgtaggagatccccaggggccggaaaaactggccttccagaccggacaggaagagcaccggagtgaataccagcaggatgatgacggaggagaaggaaatggagcctacgatttcgctcttggctttcatcagaacctcatacttgctcttgcgcttatctttcggcagggcggcgttcctgttcaggtgcctccaggctatttccacgaaaataatggcgttgtccaccacgtctcccacggctacggcaaggccgcccagggtcatgatgttgatggccagcccgaaggcggggaacatcatcatcccgaacaggatggacaggggcatggaaatcagcgtgatgatggccgtgcgaaggttcagcagcgtcaggaagatgacgatcatgaccaccgctccggcaatgaggagggtttccgtgccgttatccagggacatttcaataaaatccgcctgccgataggctgcggtgtgcagtttcattcccttgggaagctggctttggctgaattccctgacggctgcatccacggcctgtgtcagggccagagtattggctcccggcaccttctgcacggaaagcactacggcgtcttcccccataaatccggcatctccccgccgcggcgcaccgtctatcttgacttccgccacatcctggagccggagtattccggaggcatggtccggaaccagggcgcggttgagctgttcaatattggcggtgcgggtatcctgctggatggggagttcctgcccggctacatcctccagataccctgcggggacggaagattgggattcctgaatagccgttttcaggctggaaaggtccaccccggccagtttgagtttgttgggatcataaatcacctggtattccggcagacgcccgcccagcaccgtgacctgccccaccccgggaatggccagcaggcgcgtgcgcagcttgtattccgccagttgcctcatgtccagctgggaggtatccttgtctccagtcagggcgatgagcatgatttcccccgttatggagacgatgggggccagctccggggatgtcccttccggcagggattcccggactgctccaagacgttccgttacaatctgccgggcctggtagatatctttgttccagtcgaaatccacccatacgaaggaaagcccgctgccggaggaggagcggacgcctttgactccggcggttccgttcatggcggactcaatgggaatggtgatgtattgttccacttcttccgcagtaaggccgggggcttccgtctggatggtgacacgcgggaccttcagttccgggaatacgtccacgggaatgttcttcaccacgaaaatgctgatgattgccagcgcaatcgtcagcaggatcacagtaatcctgttgttcaggcagaatgaaatgagaaagttcatggattctgattgctgaatacctaagattcaagggtttattccaaggaaatccggggtatttgttccttaatcttttattttgtacatcgtttagtgttctccttcgtggaactggccgtccgcgtggaagtgcccggctgcttttttgcttccggcctctccggtgggcaggatgtatttcaattcatacccgcccttggtgacgatagtctgtcccggcatcagtcccttgacgggcgtttttccctgacgggaaggcagtgtttccacttttttcatgacaaatgtatcgtttcccgccttgatgaaaaccacgtcgttcacccctaccttgacgacggcgctgttggggacgggaatgaagccctccgcggcggcgtcatgggagtacagatccaaccgggccagctggccggcatgcgtcccttccggtatgcggtccggggtaaaatacagggccctggactgggtggcgggatctacctgttcggccaccctcagggagccgttcagcagttccgtgtttttaccgctggtcagggccagccgggcttttgcataatggacgggatccgtcccataaatggtcgtggtaaattccagatcccctttattggtcatgacgagggcaggcgcgccctgttctccccaggccccttgggtcatgttcacggactgaacggaaccatccgccgctgcgtatatgtaaagaaggttatttttcaatacgccggactccatcaccagtttcaatttattgttgctggcgttcagggcagcccggaggctgtggatttccgcctctttgaattggatggaagtattcagttcgctgttgcgggtgccgattttttccaactgggcccggcgttccctgagggttccgagttctgctgcggcacggtccagcgcggccctggcctgggaggcgtttccttccatttccacaatatccggggatgccagcgtgtacagcagttcccctttgcgcacttgttgtgcggatttgacgttgaatgtcacgcgccctgcggcgggaagggcgtatgtggttaccgcatggggaggaatgaccatctgcccgtgaagggttttcgccgctccgtgggaggtttcctccactttctcaaagcgcatgtccagagaatggcgcgctttttcatccacatgcacgggaatcatgtctcccggttggctggaatttttttccgcagactcctcgcgttcatggtcgcccgtgcatgcttccccttccgcgtgctggtgaccttccagttcatggtcgcctgtgcagacggctccgtccgcatgcctgtgttcttcgtgggcgtggccctgagtacaggtttcccctgccttgtgctgatggtcgtcatggccgtgatccgccgtgcaggcggaaccgtcctcgtgtttgtgttccgcaggggcaggctgttctccgcgtgcggaatggagacagaaagcaggagccagtcccagcatgatggaaaaataaagatgtttcatgttcattaaagatgatggagggttgatgtgggttaaaggttggcgtgggtgaggtagcggagctgggcctgaacggccagaagcttgtccagattgtccaggaaagccaggcggctttcgtaaagctggtggcggttttccgccagttccagcagggatgcttccccaattccgtgcagcttttccatggtccggacggaggcggcgaaggattccatgcgctggagttccgtgcggcagtggcggagcgccatctgctggcttgcgtcaagctggcgggcgttgaataattccgttttccaaagctggatggtttcctgtctggacaagtcccgtgtgcctcgggcttccgcaatagccttgcggttgcggttccaaaggggaagattgaaccctatttctccgcctacttccttttctccttcgtcgcgggtgaaggaggggccgagctccagttccgggtactgccggcggatttccgttttgaataatgtctccgtggtggcgtaggtcgccagttgtgccttgatttttggagaggcggtcaaggctgaagggctgggagccgatacggcggcgggaagctggaaactctgtttcgtcaggaaaccgagtttccgcaccgcagaaggatgcaggcccatcagcttgacgagttccatcttctgctccaattccgtttccgtcacggtttggagttcccggatagcgtcattcatccgctgggaggctacctgccgagaggaaaaatccacttcccccgcgccgataagctgttcaatcatgccgttttcccgtcggatggcatccagccgttcccggatgaccgtcttgcggcgctgggtaacggccagtttgctccatgcctggtccagggaactgagaaaatccagttcagcctggcggagggtccagaagtcggcctccttgtattgttccgccacttttttttccagggcggggaggccggttacgggaatggtgaagcccaggctgccggacatgttgaccgtattttcctggaggacttgttcaatatcccaggaaaaggagggatcgttccaccagcccgattgcctggctacttcattgctggaagccagtttcagccgggctttgttcagatccggattcatgaccaggccgatctggcgagcctggttctgagtgattgaggtaggggaatctacgcgggacgcctctttccaggaggcttcctccgcgttcaggtcgataggcgcgctgtggtagacgctgcatgagctgagcagggctgccaggcctattccggcgaagaatggtgtggatttcatgatggaaaagataataaaaacagttcggtccaatcaggtttggacaatgcggcgaataattccgcggaaacaaataaaagcggccgccgtattaaaggcagcgtaccgcaggaaacgcccttaaggacgtttctgaaaaagagccgttaaatcagcaggggaagttgaaagccttcatgcgtcggaccggtgttcctgaaggggtcagggggaaccggtgttgcggaatccgatgtttggcttgttaaaagaagaggccgggccagatggtggaaatccggcaatgtctgccagatgacataaggctggggcagaggtgcatgaggaacgggaaccgtcagatcattaatctccagctgccggtgttcgcagaggtgcccggccaaagggctggaagagccggtacggggctcatcgtccccgtggcattcgcagggggcggcatcctgatggcaggaacaggaaaaaatgaaaatttcttcatggcacgggcacacggaaaccatacccgttccgcctacgacgaccagcagaagggtgagcagcatgatgccggtgcgcaatgctctaaccatggtatgccgcgaatcctagaaaggagccgtgaaagcgtcaagagcaaaagtggcggatgtctgaaccctgaaggaaaggccgttatttttccgccgctttgcggagcaggtccacagtgtgttcaaaagctacgccgcggacatcaatgatccgggagttttccgcgattgctccggtgatttcctcccggaatttaccggactgttcttccgtgagcaggtttttggagctcagggagcgcgtgatgagctggaggacgtaccctgtttccacgaaagactggcgtcccacggctttcttcatggcttccatgaattccggggcatgttcgggcggcaggccggccacggccttttcataagcacggatgaaggaatccaccggggctttggaaacttccgtcttggtgaggtcaaagctggattgataagcgagagctccttcttccgccagttgaagggcgtttttcccgaatttgttgacggcagtcatatccgctcctttttccagcagcagggccgccacctggaaattaccgcgcatggctgccagcatgaggggcgtaaagccgttgccctcccggttgttgatgtctgctttcctttcaatcaacatgtcggacaggcggtccagcccgctccaggaagcccagtgcagcgcggtccacccgtccttgtccttccggtcgatttccacgcgggggtcttccagaagccggtccagataaggggcccgagtggcttccagcttcagcgtggtctcaatgttgttgtagttggcgtagcatacccacatgacaggagttctgccatggggatccgtcatgttgacaaaagcctttccttctgccgcagccagttcttccccttccttcagggtttgttcgaattccttcattcccttgactcgggcttccttctcctcctgttcggaggaagcgttgacttctttggcctccgctttcttcattacggtgataaggtccagggccgggttgggatctccggagaaagatttggagaccaacaggctgagaccgccgaggagggagctgaaagctaccaggatgagggaatccacaatgatgttgcgcgtgtgctggttcatggtctcgtaaggtcaggagttggcttccgtaagttcttccgccgtcagggcgggatccgtttccgcttcaatggcgctgatgggtggcgctgccgcgtcttcctcgggatggtccgaggtgatggtcctgcgggtcatgataatggcgatggggctgattacggccatggccaggtaaatggtccacatgaattccggggagtcccagaagccgatgtgcccggtatccatcttggcgcagatgccgtcatagcagaggtaggcgacgagcaggccgccgatgatgccattgatgggtttggcgatgaacatgggaagcgccgccagagacatgtaggaagccactttgtctttcggagctacccgcgccacatattcggagaagcggggagagaagagcaattccccgaatgcgaataccaggatctgcgccacaatggctaccagatacgcctgggagcgcgtttcgatgccgggcaccaggtagtaccattcaatgggaatggccatgaaaacgagagagaaagcggagatggacatgcccgcaatcatgagaccaacggtagagaagcggcccagcaccggaatgagcaggatgaggccggagacaatgatggccgggttgacggcattgatggatcctatggcaaaatcgtcatatagcgtccgcacgtagtatttgggcatcaccaggaattgcagcgtgaaaacgatgcgcacgcccatggtcagcaccaggaagaggataagtttgcggaaggcggattccttccatacctccatgaagagctggagaggtctgcggaggggggcattgatgttcgcctcccgttcgctgggttccgcgtagttgtcttcattaataaaacgggtggtgatgcagcccagcagcaccatcagcgttccgaagttgatgatccagtacccgccgtccacggcgccgaagtgcttgcggaaaaattcaatcaggaacacgttcgcaatgacggcggaaatgttcatcagcaggtagtagatattgaagcccgtggaacgcgctttcagcggggtgaagcgccggatggaagtctggatgacgggggacatgaacgccgtgccgaaggacataatcagaatgcccgccatgacggccagccttccagagtccacggtcgggctgaggtccggaccgaagcccatgataaggcgcccggcaatgaggatgatgaagccgatcaggtaagtgcgccgtatgccgatgatgtcgcagatggaacccaccgcgaagacgaaggcggagatgaaaagggtgtacaggcctacccagagggcggcgtccgcatcgttgaagctgcaatagtccgtcaggtagaggacgaataccgtaatcatggaaaaataggccattccgtcgaagaactggacgacgttggtaagccagaaatccttggatacggttttcaggattttgaattccgaaaaatatttgaggatggggtttgcggactcattcatggagagatggaaacggtaaggaaaagttgacgacggtgaaagagtgggttacacgcatccccgtttcaagatttttttctcccgaaggccggtttaaccggaaaaatgcgcttcaccgccaggcccccccctctatctgggcaaaatacgccggaagcctgccacgtggcaccatgacagcgctttcaggcattgttccacagccatggcgtccgaaggcagcacgggccacagcccggcttccttcagccctgatttggctatttccgccgctttccattcgcggaactgggtgggaagggcggagaaagtgaaaaaggcccagcaggccagcccgatggccagcgcgatctggaatttcaacagtccggtcgccagcattcccagcaggataagagctgtgaaaaagggaatcatcgtggcgcgcgcagaggcggttttgcgggcttttgccgcctccgggtcttcccggaccaggctgctcatggcccaggtatgggctacgcaggccatccggcctgcggtcaccttgccttcccatgccggaggaaggctgatgaatccgttttcatccactccgggaaaccgggctttctccagtttccgctggcgtttttccgcaccgtccaggcggtggattaatccagccgggccggggaaaccgggcagttcccgggattcgtaggtgcgcaggggaatgatgcctttggtgaaacgcagcgcggcaatgacaccgagcacgaccacggaaaggaaaatcactactgcgaatagcatagacggctttttctcatatgcccgtgtgtccgtcaatctctccggctggcatgaagccgtccttcccggccaacagccgggtgcggatgcggacatcgttttttccttcttttcacgcccggaacgcttggaaaacggtgggatggcgcttatgtcggaatgatctgcggttccgggtgttcctctgggcgggcacaacattccggcatggattttcttcatgtcggaggcgctggatttgggttgattttccggcgtttttcatgtaatggctgaccgcaatggtccatattcgggaatgcatgaggaggtggctgccgtttgtcataatggcggcttccctgggtgtgtctcccgcccaggatgtggcgagccccgatgccgcggatctggatttggacctggtcaaactgaaaagtggccccaagggcagacagagggaggccatgaggaaggtcctcctgcttgtgcatctgaagcaaaaggaaacgtggctggcggaatccacgggggatgaggccgtgcatctggcggcggagatttccttccgccggtatttggcttcagtgaatatggacggatgcccggaggaattcaagcgcgctttcctgcggtatgcaaagctcctgaattcctttaaagaaaaagatttgaacagtgtcgcggattttcctgcggtccctttgcaggttgccggaagggaactgttccgggtgttgcttacttaccgtctggaaccggagcatctgctggaggaaatgaaagcgatggtggatgaggaaattgaggggaaagaggagctgtctgcaggacagatgatggatattgtccggggaatgcgggaagccctgcaatccggaagccgcccctttccagcggaaaggcctccggaagacagggtttccgggatgtagcggcttttcatggatggcatgccggtaccgtgaggaatcttgtggaggcatgccggaagtccgctccggctattccggaaggaaaatggattaagacggctgtacgtcagggtttccaggcggcggccatcagagtctggaaatggggcgggtccggctccctgtccacaatatccgtgtggatgttccggaatcccgcttccttcagcatgctttccagggcggcgggcgtgaagcccagccagcggtccgcgtaaagttcacgggcttcctcctgtccatgctggagcagatccagcaccaccaggcaaccgccggatttcaggatatcccacgcagcttccagcgctttggacggtttttgcgcatggtgcagggcctggctgagcagggccagatccaccgtgccgggtttaatgggcggcgcttcgatgtcgcccaggcggtattccagattgtccagcccgtgtttgcgcgccagctcctgccccagctccaccatgctgggggagttatccacggcgatcacctgtttggcgctgggggagatgagctgggaaacgaaaccttccccggctcccaggtccgccactacgtcatagttcagaatgcggagcagtgctccggccagcgctttccaggaacggcctggagcgtagttcttgcccagacggcacactacttcgtcaaaataggcctgggtgcggtttttgcgcttgtccaggataacctgaagggctttttggtccgtttccgcctccggcaattcctcgcaggctttcagggctacgttgtgcagatcgcctgccagggaaagagtgtaaaagacatttttgccggaacgggcgtcctccaccaccccttcctgccggagctgggccagctgggtggagatgcggctttgccccatgccgagaatttcctgaagttccgcgacgctcagggattcttcattcagaacgttgatgatgcgcaggcgggtgggatctgccaggagtttgagcgtttttagggttgacttcatagcggaataatatatcaacacatcgagatttatcgatatgagcagaaacacccctcacatctttacgtcggaatccgttggagaaggccatccggacaaggtggccgactacatttccgactctattttagacgcctgcctggctcaagacaaaactagccgcgttgcatgtgaaacgttggtgaagagcaatatggtcatcattgccggagagctgacgaccaaggcggtgatcgatccggaaaaaatcgcccgccaggccattcgggagatcgggtactgcaacaggcaggacgacgacgttttccatgcggataccgtctttttcacgaatctgctcacggaacagtccccggatattgcccagggggtggacgcccgggaggcggagggcaagggccatgcggagcagggcgccggagatcagggcattatgttcggcttcgcaacgaatgagacgccggagctgcttccggcccccatcgtgtttgcgcacaaactgctcattgagctggccaggaggcgcaaacgcgggcatgtggactggctgcgtccggactgcaagtcccaggtggctgtggcctatgacgaagacgggcgtcccgcgcatattgaaaacgtagttatttccacccagcacacggaagacgtggaccatgacacgatttactcatattgcgtcaaactcattaaaaatgtgcttcctgcggagcttctggatgagaggacggaatatttcatcaaccccaccgggaaattcgtcgtgggcggtccccacggggattccggcctgacgggccgcaaaattattgtggacacgtacggcggcatggggcgccacggcggcggagccttttccggaaaagacccgtccaaggtggaccgttccgccgcgtatatgtgccgctgggttgccaagcacattgtggctgccggactggcggataaatgtgaattgcaggtggcttacgccatcggctaccccgctccggtttccatccgggtggatacgttcggtaccgggaaggtggaggaaatatccattgaaaatgcgctggaaaacatcttttccttcaagcctgcggatatggtggaacagctgaacctgcttcggcctatttaccggaagacgacgcactacgggcatttcaccaatccggagctgccctgggaacagctggacgaaacgcgcctggcctccctgaaacaacttcttcattaattcctacgacaacgcttacagacatgttttcagaaacggaacaatacaaggtgcgcgatatcggcctggcggatttcggacgcagggaactggatattgcggagcatgagatgcccggcctgatggccgtgcgtgaaaagtacgctgcagccaggcccctggagggcgtacgcatcatgggctccctgcacatgacggtgcagacggccgtgctgatagaaacgctgacggctctgggcgcttccgtccgctgggcgagctgcaacattttctccacccaggaccacgccgccgccgccatcgccaaatccggcacccccgttttcgcctggaagggggaaacgctgcgggaatactgggactgcacgtggaaggccatgaactttccggacgggctggggccgcagctgattgtggacgacggcggagacgccaccctgcttatccaccgcgggtatgaaatggaggaaggctccgactgggtggataccccgtcggaatcggaagaagaggaagtcatcaaggccctgttgaaaaaaattgccgcggcgactccgggcattttccatcgctggcttcccgagctgaagggcgtttccgaggaaacgaccaccggcgtgcaccgcctgtaccagatgcaggccgccggccgtctgctgattccggccatcaacgtaaacgattccgtaaccaagtccaagtttgacaacctgtacggttgccgtgagtcccttgtggacggcatcaagcgggccacggacgtgatggttgccggaaaggtggccgtcgtctgcggctacggggacgtaggcaagggctgcgcccagtccctgcgcggcatgggagcccaggtggtcgtgacggaaatagaccccatctgcgctcttcaggcagccatggaaggttaccgcgtactgacggtggaagacacgctgggctgggcggatatttacgtgaccactacgggaaactgcaacatcatccgcatcgaacacatggaaaaaatgaaggaccaggccattgtctgcaacatcggccacttcgacaatgaaatccaggtacacaagctccagacgtatcccggcatcaggcatcttaacatcaagccgcaggtggaccgctacacgttcccgtccggcaacagcctgtatcttctggcggaaggccgcctggtcaacctgggctgcgctacgggccatcccagcttcgtgatgtccaacagcttcgccaaccaggtgctggcccagctggaactgtggaatacccgtaaagaccgttccgtgggcgtggaagtgctgcccaaggtgctggatgaggaagtggcgcggctgcacctcgccaagatagggtgcaagctgactgtcctgcgtccggagcaggcggactacatcggcgttccggtggaaggtccttacaagccggacttttacaggtattaaccttgtcaaggttttcttttcctggccgttccgcgcaggcctgtccggcggaacggcttttttgttttcccgatgatggagggaagcaggataacggtacgtttatttttcttcctgttttttatgcaggttccctgctgttagtgaaaaaaaggaagactttttatccggtctttaatgttcaaatacctttgcagcaggcaaaacgggagcaatcttggaatgctgaccagccagagcctcggcctgcattgcagaatgttccaaaaccatttgagtttggtaagaaggctgttatcgaatgaagcataggggaagagcaggagccttctctgttccgcctgaatcagactcatcaggcgatcggcggcctggtatgttatttccccggacttatgctttccgtatacctctttcatgatcattatccaggttgttatcaggaattccgatctcttgatcaggattgtcctggcgttcccgctcttaaaattgcagatattactgttgtgtctccgatagtacgaacaccgtttgccggatgcgaccatgcctgattttttcaaataggcgcgcatggacagcattgtatcgtccgcaatgccggggcctgaaggcaaatattcgaagtcgctgaacaaagacctgtggtacatggcatttccgccaaaacagctgtaaacatgggaaatgtcaaaaatacattccctgtagggtttgacgacgacggaatctgaatctggcaacatgcgtccataagcgggttgtccatcttcatcgatttcattataagaatggcagtaaaccagatgaccgggatatttttccgccagagatgccaacgaggagatcctgtcttcccgtgcgatgtcatcgccgtcaaacttgataatccattccccccgggacaaatgaacggcacattgcaaattccctgcaattccccggttgctttcgttacggtggagaataatacgccgtccttctccctctttttccaccatttcttccaggcattcaaaagaaccgtcctgagaaaaatcgtccgaaataattatttcccattctcctggataatcctgttttaaaatagcccggaactgttccttgataaaacgtttctgattgtaacaaagaagaatggctgaaatcatgaaatcgaataaacagtttaagtttttttaaactgtctaaaaataacgaattccaaattcgattggggaattccaaatccggagtcaaggttaaattttgaaagaaaggaacttctgaaaataagcttccccaatgaccggaatcttccgtcttcatgattccatccgggtaaccccatcaattcccattccggcagaaacatccatacctgccggaaagtccgtatttcaaagaaaattattgatcatcagttttatttcctttctgcgaagaggctctcctgtcatgcagaaacaaccgcacgcaatctctttttaattacagcggatttggaatccgtgtaatattccccgcactctttttactgtgcgtgcactcagagagcaaatccctttttttcaataatttatgttgaagggtacggtttgtttctcaacatcaaacggccatggatacttcttcccggaaaacgtctcttgttgtattgttcaaccatcagtatgaacgtaacattccggtaatcagagagctttattcaagacgcttttccgggttgcttcaattaatgccctactacaagggagatgcccctgacgtatgttccgtcttcgggaattctttccagttctataattatattttgcagtccagggaaagaatcaggcagttggagggcgattattttcttattatcggagacgatcttcttttaaatcccaggtttgacgaattttcaacgccgtccctgctgggaatccatggggaggatacgtgttaccttgacggttttgtggacgtttctctgccggtgtgttaccggggaacggcggaagcccaccatttttccataacccctcccggtattgatgcggaaagcgtcaacaggaacgttccgtcctatgaggaggccaggcggattttaaaatccaggaacctcatgcggcatgatgaattgtcgcgcgtacgcatgtttctgcccaaatggagccccggggggattcatgcgaattggaaagtgttgaagggcagggtatggcatttgctgaattactggaagcaccggattaaaaaataccggtattcctatcctgtcgttttcggatattcggacattgtctgcattccgaaagggaaattagacgatttctgccgtatccttgaagtgttctccgcatggaacatgtttgtggagctggccattcccacggcgttgcagcttcttcccggaacaaagctgtctacgctggaggacacgcagtacaagtcgggaaacgtctggtttccccaggatccggaacactttgaagccatgaatgccgtcattgacgggctcgtgtcctcttccggaggagacctcggcaagctgcttgcctcctttccggaggaatacctgtatctccatcccgtgaaattgtcccgtttcgccagatagtggcgtccataaattgtttttttatcccatgatgaaatatgctgtgatcggagccggggtttccggattgtccatggccggaatgttgctgaagaaagggcatgaggcagtcgtttatgagagggactcccggcccggcggcctgattaaatgcacggaagtacaggggaacctgtatcatcgtgtgggaggccatgtgttcaattcccggcggcaggaagtgctggactggttttggtcccggtttgacagggagcgcgattttgtttccgcccggagacgggctgttatttccctggagggcggggctgtggtggattatcccattgagaaccacctcgaccagtttcctgaggccgtccgttcctccatcgtccatgagctgctggaactttacaggaatcctcccgcggagccccgctccctgggtgagttttttctgaaccgtttcggaaaaaccctgaacagcctttattttacgccgtacaataacaaagtgtggaggcaggatatcagccaaattgccatggattggctggaagacaagcttcccatgccgagcgtggcggaaatcctgttgaacaatattgggcacatcaatgaaagcgccatggtgcacagttctttcttttatgcgaaaaacggcggttcccagtttctggcggatacgctggctcgcggccttaaggtcaggtatcggcaggaagctgtaaatatcctcccgaaggacgggaaatggctcgtacagggagaattgtttgacagagttgtctttacggggaatgtcaggcagcttggggattgttttccctgcatggatgaattgcgcccgtttttcccccggatttcagaattgcgctctcacggaaccacttccgtgctttgccggatttcccccaatgattacagctggatttacatgccctctccatcccaccgttctcaccggatcatttgcacggggaatttttccagaaataataataacggggacatcaccaccgcgactattgaattttccgagcaaatgacggaaggggaaatcagtcgccagctggagcttattcccttttcccctgtgtatctggcccatcactgggaagaatatacctatcccgttcaggatgtttccagccgaaccctcatacgggaactaaaggagtgcctggaaccgaaaggcatttatctattaggccgttttgcggagtgggaatactacaatatggatgcggccatgggggcggcccttgatttggataaaaggctggctgcggagcagatgacacggggataagtcaaattctggacattgtggtgtatttgaacgggggattgtaaatccgcctgtttttaaaaaagtttggatatagttataaaaaaataactataaataacttatcgtgttgaatggttttttggtaattaaaaaaatcctgtttcaatccgtggttccatgcacggagatgattctccgttaaagttttccattgacagcggatttacaactcgttataggtgcggacgcagaagatgtgttcccgtttttagggacatggtttccaccggaatctgggagtatggctatccgttattgttctttcgcgacccgcggctatcatttgcggcaatggatgcagatgatgagcctgaggctggcggattcctcagtggagttgtcctgttggaatcttaatcgcctggaaagggaaggaatcagggaggctattccatggtttgacccgaatttacagggtgccgggttttgggtatggaaacccttcatcattctcaaggagctggaacatttggaggaaggggattacctgctttatacggatgcggggcgcccgccggggaggcttttccatcattccttggagccgtttgtccaatggctccgggagaaggggcaggatatgatgccgggcgtgaatatttcctattatacgggaggccttacgcggtggtgcaagcagagcgtttttgatgaattgaagctggatagcgggtcttttgaacaggctcccctgattcagggctccttccttttcttgaaaaaatcggaacaaagcctccgaattctccgtgaatggatggatttgtgccgtcagttcaaattggtgtcttctgccactacggaagaagagagccgttgccgcgatcattttgtagctcatacgcacgatcagacgctgctgtctctcgtggcggcgcaacatcatctggactgcctgtattccgggaagggtgtcattcatctggaaggccgccgggcgtttgagcggcatcccggttttgacgacaaagacccggactggtttttggaagagcttggcgcaaagaaagcggagcatcccttaatgcccgtgctttgctgcatgcaacaggcgtttttcctgtatgaaaaagccatgaataaattgatgaagctggcgggcttgagacccctccgcgggttttacggttgatggacggttgtgtgcggaaggggagtttgcctgtttcggcctccgtgacggatttctccggcctgctatggacgaaaataaaaaagcgccggaaaaaccggcgcttggaaaggtagtttcccgtgtggcttttaccaggaagcgtcgaatttggggataggcgttcctttgcctccggggctgttttccggaactttataggttttgcgcagttcgtggtaacgcttcttgagctgttccaccgtagtcttgtaggcaggatcgtcaatgacgtttttcatttgcatgggatcctttttcatgtcaaagagcatccattcgccgctggtccagatgtaggaaagcgtgtagcggtccgtccggatgccgtcgtggcgcggggcgttgtgttcgccgggattttcgtaaaaacagtagtaaatggcatccctccagttgtcgggagttttgcccgtgaaagcggtgggaagcagggatacgccctggaaggtattcatgttttccggggtgtccgcccctgccgcagaaacgatggtgggagcgtagtcgatattctgcaccatggtgttgttgcggatgcccgcgggaattttgccgggccatctcatgatgaggggcatgcggagggattcttcaaaaatccagcgcttgtcgtacatgccgtgttctcccatgtagaacccctggtctccgcagtagatgaccagcgtgtctttcgcaatcccctctttgtccagatattccataaggcggccgatgctgtcgtccacggacagaaggcatcccagataatcctccatgtaggcatgccacttccattccgcaaacgctttcgggtccttcagttttccggatttcatgccgtccaccagggatttggtgcgcttggcgtaatagtccgtccaggttttcttttcttccggagtcatgcggttcaactcgcccaggtcccagccgtaaccgggggaaacgatgcttttgcgcatttcttccggaacctggtccttaagcactttgaggtcggaataaatcgccatgtgattggcgactgtctgctggtttttcttcaggaattccggacggttggcatagtcgtcatggaagttggcgggcggcgtcatgctggaagtgtccaccttgcccaggtggcgcagagcagggcaccaggcgcggtggggagccttgtggcccacaacgagcaggaaaggcttgttcttgtcccggttttccagccactggatggatttgtccgtgaccacgtccgtggcatatccgggaaaacgctttgtctggcgtttgccgtccggcttgaggctgataaagtccggattgtagtagctgccctggccggggaagatttcccacgtgtcgaacccggtggggtccgattctaggtgccatttgccgaaaaggcccgtctggtatccggccttctgcagcattttcgggtaagtgggctgggagccgtccagcggtctttgtccgttgaagacaaagccgttcatgtgggaatgcctgccggtcaggatgcaggcgcgggaggggccgcacagggagttggcgcagtagctgcggtcaaaaaccatgccttggcgtcccagtttgttgaaattgggcagagccacgggggaatcattattgccggtgcccagcgtctggtaggcgtggtcgtccgtaatgataaagaggatattcggttttttattttcctcagccttggtttgagctgagaggggagctgccgccagcagggccagagttccggcgatgatggttttcaaaggtctcatattgcctggaggatataggatgacggcgccgtgtcaatgtcataggattccttttgccgagattctgcgttatggtattcttgccccatgctttcctctgctctggaagacacgctgcgtttattcggcaaggaacggttccgtcccatgcagagggatctggtggagtgcgcgctggagggccgttcctgcatcggtattttgcctacgggttccggcaagagcctttgctatcagattccggcggttctgggaaatgggctgacggttgtggtttctccgttgattgccctgatgcgcgaccaggtggcagggctggaaaaactgggcgtggccgccgccaggtatgattcgaccctggcggaagaagataaggtcgccctgatggacagattgaagtccggaggcgtccgccttctgtttgccgctccggagtctctggaatccccgtggattcagcaggtcatggagtttgttccccccggcttgttcgtggtggatgaggctcattgcctttcggaatgggggcacagtttccgtccggattatctggggctgcccgtttttttcagaaagcacgggttccgcagcgtcatggcgttgacggccacggctacggagcaggtgtgccgcgatctggccggcctgtttggcgtgagcgatgaatgtattttccgggttgcgccgtaccgtgcgaatatcttccgccaggtggaaacgttgaaggatcaggataaaaccgcgcggctggttgaattgttgaaagagggaggccgccgtcctgccgtggtgtacacgcggacccgcaaagatgcggaaaacctttcctacgaattgggaaaagccggtttctccgtcaagtcctaccatgcgggcatgcccccggagacgagggggctggttcaggatgagtttctggcaggtacggcggacgtgctggtggcgacgattgccttcggcatggggattgacaagccggacgtgcgttccgtggtgcattaccatccccccgccagtctggaggcgtatgttcaggaatccggccgtgcaggacgcgacggccttccttccttcagcctggtgatgttgtccgcccgcgacagcgtggccgtagtcaaccggctgcatgcggcggagccggaccggcacggcatgaaagggctggtatctctgttgtcccgcaggggggagcacattgtttccctgtatgaggcttcttccgtttatgatttgccggatgtggcggtggaccggatgctgtttgacctgaaacgttccggttccgtacgggagaaggggacggggttcaagtattacagggtgcgccctctgttccggatggaggaaattctgtgcggccgcggcggggaggaatgcgcccggctgcaatggatggatatgcgccggcagggagaggtggaggatctggctgtggaatggggaatttcatgggaagaagccgccgcctggcttggtgacctggctctttccggggaatggaaagtggagctgcgccaggcagcccttcatctgtattcggaaggatttgacgcggaagaggctgcggaggaatttgagcagtatttttccagatcccggctgaacgggctggaacgctggaaaacctgcgtttctacgctgacgtcttccgcctgcctgaatagaagcctggatgcctatttcggtttccgggacctgtccgggccttgcgggcattgtcctgcgtgctgtgggatgttgcctgcggccatggaagaagaggaacttcccccgttaccggaagagctgcgctccgccgtcatggagctggcggggcagaggaagcccgcgctggcccgcccttcccagttggcgcgctttttgctgggactggcttctcccgcggccatgcgcgcccggttgtggagccatcctctctatggggcgctggcggacaggaaatgggaggatgtgtggattgaggcgcatgccctgtcgggtagttagaggccggtttttccgccttgggcggcttcataggcggcaataatgcgtttgcaggaattttccgcatgcagcagggaacaccaatagcgggatatttcctccgggttgcgttttccggagtcccaggcgcggatttcttccaaaagtgccccggagaggctttccggagaatcgttcgggctgagtgtgcctgaatcatgggaaacgtaccattgcaggcagttcagctggggtgtgaggcgaggccctacgacagaggccccggcgcacagcgcttctgcggaggcaaggtgcgttccttcggacaaggaggtgcagagactgattctggcctgggattgtttcttttgcagttcgatattgggaatatagccagccagatgaatccgggtgcgaagaggctccggaagattgccgtgccattcccggagaaagtcaggaatattgccgtaaatttccgcttcccagtgcggggcgtgggcaagcgcctgttccagcgtggacatcagcaggcaggggcgtttatagagaaggtcgtcccagcggcctacggccataatgatgttgcgcttctctcctgcaaagcggcaggtggaagaaatggggttgggaaccagagacagtttccggacgatggattttccatagagccattccctatctgcaacggattggagggctgccggaatggggaaggcgaccatgtcccctgagtccaaatgttttctgcgccccctgctggcgaggttccatgtgtgctgtttcagaaggcgcagcaggaaaaaagcggaacctttgattttcccgtgaatgaaaacgtctttggtgtacatgtttttcgcgatgggaagccagtattgccacggaaaaaacagcccggatgagtccatgtacactaccagaaagattcccgcgtcatggatggctctggcgatgggaaggtatttgcccactccccaggcgtacaggatcactccgtcaatacccagggatttccaccaggctgcatctttcaggttggcgtattccgtgcggatgaggtcgggatcatctccttcctgggcaggtgtgggcatgatggccctgctttccaccccgattctctgaaaggccttgcagaaagcgcctgaatcgcgggaaaagaaagtatggtctcccttgaaggacaccggcgtgcatgtgtaccatttcatgatgttggtggggtggaagatgaatggaaaacgcggagctcgccaagaagggcttccatggaccggagccatgcggcgggggagtatgtggaggacaaaagttgttgcccgtgcgcgcccatggccggccagcgttcttcttgcttcagggcggtgtgcagcgtctccgccagggattccacggaaggttcctgtgcaatccagccattcctgccgtgggtgatgagctccggcaggccgccgttcggggtaacgatgacgggcgtgccgtggagccatgattccaggacaaccataccgaaggtttcctcccagagggagggcgctacggagaggccgcaggcggcgcggacggctccttgttcctcatggggaatgaacccggtcaggcggatggattcaagatggcgggaagagatataacgcttcagttctccgcgcagggggccgtctcccatcaggtagagaatgcggccggggggggataggagttcccacgcctgaaccagttgcaggactcctttttcctgcgtcaggcgtccggcgtaaaggacgtcccggcggggcgggccggcggaaggggcggcggaaggggcggggttttgccggatgaaatgtggaataaccctgattttatcctccggtattccggtttggatgagaagttcccgctggcgccggctgatggcaatgtaggaggaaaagcggctccaggctcccatgcggcgcgttttatacaggacggcggcggccagggatgagtacgcggcgtttttcctccaacaggcgtgcatgatgccgggaaaatagttgccgccttggcaggaaaagcagggcgctccgtcccggtaaaatactccgttgaggcagccggagcggtaattgtgcatgtagtggatgacgggagcgggttgatgcagggccagttcatagacgcagggggacatggccgggaacgtattgtggatgatccatgcgtcatagcggttttcacgcaggcattcgcgcagtttttgctccacatccctgttgtggagcaaataacccattttcgtcagggcgccgtgggggctatggaacagctcctccgttgaatagacaaagggtgtgacatccgctatggcgcccaaagcctccgtaatggcatggaagcagatttcttcccccccaacctcgccgtaacggctgaaaatatgtagaatgcgtgggcgttgcatggctgcggcggcacagggggttatccctggagttcccttctgagtttcgcgggatccttcaatagctcccgctgaatggcttcctgctgctggcgcagacggtcttcccgtaactgaagggattttttcccggctcccagcccggcattgacaaagggattgttgtccccgtatttggaccacgggccgcggggaatgcggtaaaattccacaaagcgccagtggacaatggctgttcctcccgtaatgcccagatagtcgcgtacggcaggggagatgtcaatgcccgcccctttgttctgggtattgacgggaggcttgtctccgaagacgtagggccagtcttccgtggtgaaggggccgcagtcttcccattgggcaaaacaggaacgcttgttgtagacgatttgcacccatctgcccttgcagacggattgcccctttcccgcgtattcgcggcggaaccacgggatgacccgtgacgcctccgccttatgctcccctctggaaacgtcattataagggagcgccacgtaaaaggggttttgccgggggatgaatgttttcgggcggaagtccctcgtgcggcaaacgggatccgggttgtcgaagccgccgaagttttcccgccatgcggaatcccacgagcttttgtggttggctaccggattgcgttccgtgggttcttcccccacccagaagaccgtggcggtaatgttgagacgccagggataggtgccggggctttgcctggacgtcctgggaaggatgcggggagcgggccgctttcctccctctgcagcaacaggcgatttgacgatgacccggggcagggggtcccgttgcgttggggtgacgatgacggggcctttgggccgtccggaactgttcgccagggcgcgggtggcgctccggcctgtctggatgtccgccctggcggtttctgcggaaaccagaaccggcagcgtgagcaggcatgcggacaggagggggctcccgaagagccccttccgtaatgcctgttgacgctgccggtagtttaccatcggtgcagttgggtgacgaagcggtggtccagcttgccgggataatccgtattgaaatgaaggccgcggctttcattgcggcgcatggcgcagtccacgatcagggaggccaccgccaccaggttgcgcaattccagaatgtccggcgtaatgcggtatccccagtagaagtcctttacctcccggtgcagcatccggagccgcgtggctgcgcggtccagccttttattggtccgcacaatggagacgtaatcccacatcaggcggcggatttcatcccaattatgatagatgacggaaagttcgtcaggcagggctgtatctccgtggtgccaggctgggatgtcgtaaggagtgggggaatcctttctcaggggatgcagggagagcatggagttcagcgccctcttggcgaccaccacgcattccagaagggagttggaagccagccggttggcgccgtgaagaccggtgcagccggtttcccctgcggcgtaaaggccgtccaggctggtctggccgttgacgtccgtcagcacgccgccgcactggaaatgcgctgcgggaacaacgggaataggttccctggcgggattgacgccgtagcggttgcatgtctcgtaaatcaggggaaaacgttcctggacgaacccttccggcttgtgggagatatccagataaacgcacatgctgcccgtcctcttcatttccgaatctacggcgcgggcggtgatgtcgcgcggggccagggatttgcgggggtcgtacttgtgcatgaattccttcccgtccgcgcctatcagcacgccgccttccccgcgcacggcttcggagatgaggaaggagcgcgcttccgcgccttccgcgcgggtgttgaagaaacaggtgggatggaactgcacgaattccatgttggcgatggtggcccccgcccgccaggccatggctacgccgtcccccgtggcggaatcattattggtagtgtacagatatacgcgcccgcagccgccggtggcgagcagcacgcggtctgaccggaagatttccacttccccggagacgcggtccagcacgtaggctcccagaacgcggtcttccgtgacgaggcccagcttggtggtcgtaatcaggtcaatggcgaaatggtcttccagcagttcaatgttggggtgaagcttggccgcctccagaagtttggaggtaatttccagtccggttgcgtctttggcgtggaggatgcgccgtttggtgtggccgccctccctggccagttcataatcctctccctggttgccggggtcaaagttcactccccattccagcagttcccggatagcgtccgggccttcctccacgatagtgcgcacggcctgttcgttgcagaggcccgctccggcgtccagcgtatccgcaacatggtcttcaaaggaatcgttgcggtcccatacggcggcgatgccgccctgtgccttggcggaactgcaatccagaaatttaccttttgtaatgactgcaaccttgccgtgttccgccgctctcaaggcgaaactcaatccggcaacacctgccccaatgactaaaaagtcgctcgtcttcatcttgaatggtacggaattgtaccatgacgcgggctgccaagtcacgcccaatgatggggcggcagggcatatttgtctggaaaagaagtgtgaaacacgctaattcatgggcatgagaccccaagggaacgaacaggaagcgcgccggaacaagcatgtgcgcagcgcgccgtccaaaattgccgtgaaggcgctgggagaggaggtgctggacgggattctggacaaatcctccaaccctctgctgcttattctggactgcgtgcaggacccccacaatctgggagccatcctgcggacggcggacggcgcgggagtggatgccgtcatcgccccccgggacaaatccgtgggcattacggagacggtgctgcgcgtttccgtcggcgctgcggaaaaggtgccttttattcaggtgaccaatctggcgcgcaccatgaagcagctccagagccgcggcatctggatattcggcacgtcggacaaaggagaccgcggcctgtatgaaacggacttcacggggccggccgcactggtgatgggggcggaaggggaagggatgagaagattgacggaagagaactgcgatttcctgctgaggattcccatgaagggaagcattccgtgcctgaacgtatctgtggctacgggcgtatgcctgtatgaaatagtacggcagcgttcctgattccatgactgtttttctccctccctcgtctttatgattcaggaacttgatcttgctccgggggaacgcgccaggtttatttcagacatccatttcggccatgccaaggcgctggcccgggagccggaagagctggggtttcttctggaggggtgctcccatctggtagtgtgcggggacctcagtgaaacccgtgaaagcccctgccgggaggaaggattggaaaaacgggcccgtttcctgcggatgtgccgggatgccggggtgcagcccgttctgctggccggcaaccatgatccggacgagaaagccggacttctgaaattgcagggcggccgcatctgcgctttgcacggccatgcgctgttcagggaggtggctccgtggggatgggaatatttgaaaaacaagcaagtttcccgcgaactgatcgccgcgttcccggaggcggaggcagatttgctgcggcggctggagctggcccgtgccatgagtgtgctggtgcctcctgtttacacgcgttccggaacacatcaaaataaactggtgcgttttttagctcattctgcttggccgccggaacggcccgtgcggattcttctggcatggctgacgatgatgcggcgcatggggaaatttgcagaccgtttttttccggaagcggaagtcgtcatttttggccatcttcaccgacgggcggtgagcgggaaaaaggggcggcggctgtacgtcaacctgggtgcctgtttccgccatgccagatgctgggcggcggacgtaacgccggaaagaggagtctccatccgcagttatacgcccggaggatatgatggcccggaggaaattctccgctgattgatgcccacggaaaaaaagtgaggggaacgcgtccgtgtttaggcgataatgtgttagagcaccggatgactagtccatacagtttgtggacgcgttccccatagaatttggccgcgcctgttttccctggtatccggcgggacagtttttcccggagcttttcagggcgcagccccggcagcagcaggggcgcgaggaggaaaaaaacctggagaagaagggctccattctggcgggtgcgccgccggagcactttctttcaccgtttctttccgaattggggctgaccatgaagcaaagttagtgtaatctaactcatattgcaagaaaaaagtttgtctcgcctaatatttttcaagaagaggttgacttggtcagagccttggttattgttttttgttagttaaatctaataaacatcaatcatgatacatgaaaaattttccactccggagttgagcaacagcctggaggattatattgaagccgtccgcaacattgagttggaaaagggatgcgccaccgtaggggaaattgcggaagccctgaacgtgaaaaaaccttccgcctcactggccatgaagcagttgaaggaacgcggcctggtggaatacacgcagtattctcccattgtcctgaccagggaaggccgttattacgcggaccgggtcatttcctgccataccatggtgaaggagttcctcattacggtgttgaagatggaggaaaaacgcgccgatgaagtggcctgttgcattgaacatatcatgactctggaggaaatctcccgtttccagcttctgacggatcgttgcagggaaagaggagaataaaatactcccgcatgattttccggggggacagttcatgagggaatggctcatccctctcttttttacttcggaacccggaccgggggaaggcatcggcgtgtgctgcgcgcgctgacgtacactgtggaagcgttatggaggaacgcggaaaggtccggggtaatcagcccgaacatgcctagcaggatcagaaaggagttgaacccgacgataaagcggtagttgcgttctattttttcaaggacggcacagctcaattcccttaaaacaaccagttcagccagagagctggacaacagggaaatatccgccacttcacgggcgatatcggaagaatccttcatggagacggaaacgtctgcacaggaaagagcgggggaatcgttgatgccgtctcccaccatgcacactgttttgccggatttcttcaattgctggataaagcgggccttatcttcaggcagaacctgggaacggtattccgtgatgcccaactggcggctgatggcgcgggctgcggattcgctgtcccccgtgagcatgatgatggaggaaatgccctgccgtttcagccgggcgatcgtctctgcagcttccggcctgggcgggtcgctgacgccgatcatgccgatcgctctgcgacctatggcgagaaagatgttggatttgcctctggcgtgattgcgtatggtcagcctttgttcttccgtgagggggatgcgttcatcttcaaagagaaaatggtagctgcccacaagaaccttttttccatgaaggcgggaggaaatgccgtgggccacgatgtattccacctccgcgtgttcttcttcatggtgcaggccctcctccagcgctttgcgcacaacggcccgcgccacgctgtgagggaagtgttcttccaggcatgctgccgttttcaggatatattccctgctgcagtcgctcaaagggatgatctgcgttacctgagggcaggcggaagtcagcgtccccgtcttgtcgaaaacgatggtgtccgttttggcgaacagctccatgaatttcccgcccttgatcatgatcttgcgcgctgcggcctctttcatggcggagatgacggaaatgggggtggcgagcttgatggcgcaggaataatccaccatcagcacggagagagccttggagatattcctggtgaacagaaacagcgcccctgtcgtgagcagggtatagggaacgatagaatccgccagcttttccgcccggctttggatgcgcgctttcagttcctccgaatggtcgatcagggcgatgatattgttaatgcgggactggtctcctgcggcgtccacccggatgacgagggaacccgtttccagcgtggttccggcaaagacgacggacccttcccgtttggaagccgcttccgattcccccgtcatggcggcctggttgacttccgcttctccggacagcacggtaccgtccacagggatgacgttccccgcgtccacgcggattttctcccccgggcggatttgctccatgggaacctggcgcatgcctccttcttccacccgccagacgcggtctatatttatgctcaggctggccgcaagcgccgcccgggtctttttccgagtgtaattttccagcaggtctgaaatggaaagaaggaacatgatggaattggccgttccgtaagccttcgtgccgatggaaaccccgatggagacggcgtccagaacggctacgttgagccgtccgcttcccaggccggccattccgcgccgtaaataggaaccgtaattccagaatgctttggccattctgagcgggggcggcagaaacaccttgcaaagcaggaaagaggaagctttccccgctatgcggagaaaaaaggaccgggccagtttcctggcctccgcgcgctcttccggttcgtggctgcggagtgtttccggcctgagcctgtccagcgtgcggaaaatggcctgggggctggttccttcatacaggatgaacacacctccgttgcagggggtggccttgacggagtatacgcctttctgtttcaggagcctgcattcgatgccgtaagcctggtcatgattgaatgcgcagcggccgctgcgtacacggagcctgccgggcgtatgatggataacctggtaatgcatgggtaaggaaaaagaaaagggggaaacgcccttctccgtgcgtttcccccgttgggggcggtccattccgctggcggagaaggaaacgggcaccccgctgtttggtgatggacaatgagattgctactgttccggcttgctgtttttcgcggcggcctcatggcacaggtcctgggcttcttcccggatgtttgccagttgttccatggccttctgctggatgagcatggccttggaaaggccctggacggccagtttcctggcaacgggactttttactactttcgcgccgatggcggcggcgatcattcctccgacgaagccccagaggcctttgttgttcatgtaactcatggtaatgttttgattgggttcatccggctttggcggcatgcagccgcttcttttccggaaggattggattatatccaatccagcctgcatttttttagcgtgcccccgtattctggtcaagatgaattagctgaaactaattttttagcaggcatgaaaatatttttgcgatatttttaatacattgaaaacaaataaaatataatgaaccaacataatgttgtactgagcagggcaagggcattgggaagaaaaagtgttgactgaatagttagttcaatctaactttgccgcgttgcatgaacttgacccatacaggacttcaccgtttcttccgccgggtctgccggtacaggaaactggccgggctgctcatccggcgtcccagataccgtctgctctgcggagactgtgggttctgtatgggggcatgcggcagagctgtgaaagagcaagcccgggagaacggaagcggagctctttccctgtaaaaggaaagcgcccctctccacccctggatcaatcatataagtattataccacaaacatccaacgataagactaaccgttttctatgaagaagcataacataatagcaatggcgttgacgagcctcatggcgcttcctgtaatcgctcaagacagcacccctgctgttggtgatattttgcagggcatcaatatgttcactccggaagaaggcgatcctgcctacaaggtgaaggccaatgagaaatacggcacccaatggggtgtggatatggcctacggactttggaatacggaaaaggtttccgatgttaagcgccataacaacctggctcttcttcatgcccagcttaatcagcgccttattgaagacaaggccaacgggggaacctggttgcgtgtggaattttccggttcatgggggctggatcgtgaatccgcacagagcgatacgtttttcactgaagcctatgctacggcttccggcttgcatgctgacgcgatggggcctcatgaaggaatattccctgaagtggcactgatgcaatactttgcagggaagcgcgcttgcctcatcgcaggtatggtgaatctcaccaactactttgatgctgtcagcattgccaatgactccttctcctctttcaccaatgacgggtttgtgaactccactatccttcctttggtggacagcaatattggcggtattctgcaagttgaactcaaccgcaataattacatgatggttgccgtttcccgcacgggatgcgattccggatacaatccttttaattccgattattgcgatggttatgccgtggttggcgaatacggccatatctttgccgacggcgctgcgactctccgcatcaatccgttctataccagcacggatgtggacatggacgacgggaccggggaacgccgccgccaaaatgccgggcttgtcgcgagcatcgaatatactccctgcgatcctctgaccatttactcccgcgccggatttgccgccaaacaatacttgagcaactccgctgaattctccgtgggcgccaacattaagctcttcccttcccgtgaagatgacttcctgggcatttcctacggtgtgttcaaggggcagaccccctgtgacggagagcgcgctgagcataaccgcgaacaggtgctggaagtcatgtacagcttccaggtgaatgattatttcaaagttgttcctcacttccagtacatcgcgaatccggcttacagcacttccagcgaaaacattctctggggcgttcaggcagtcttttctttctgatcagctggtcctggacatggccgccttttctcttaaatcaggcatggccggagttccatgaaaacataatgacattaaatcttccttgtctgtctccatgcagtgagcggaatcctgcgtgagaaagatatagaaggggtctgcatgacctggcggcaacgccgcattctcgatcaggtagaggatgcggcgttgcttatttgattacggagccatttaccctcctttattgatgcctgctggcggagcttggaccggcaatgtatgccggatcatggaatggccctcagcctttccttatctaccgtcaaatactgactgttgaaggtaggaggcttccccaaggctattccgtagaatttttatcccggggaaaaataaaagccgcctgaaaatgggctttcccacccctgtctccgttcccggaaaaaacggaaaagaaggctttttgccacgccggaagatggatgggtgccgcaacgtttccgggggccgaagcgtttaaaaccatattgacttaaacgggaattatcttaaactgacagaatgagtaaggttcaatgggaaatttcaaatgatgaagtgaccgaccgtgatactgctctgcgccgcttgcaggaaggaacgaccggccacgtggtgtgcgcccgcgacggcgcgtgcctccagtcttataaggaagcggatggcgtgtaccattgcgaaattgtattcaagacggattcctgctgcccgccggtattcgccgccccggaaggggtgacgggaaaggagctggaaatgctttacgatcgttttgccaatggggacgatttttcctttgtggaaaaggaatgggaacctctgatggccgtggaataccgccatcgccacaatgtgatgtggttcatcttcctgttcattgcgctggtaattgcggccatggcggcatatcagcacggttggattgagtgacagggtagaggctggctgcggcaggcgccgtagcagaaaaacctgcaaaccgtagaaaatggtttgcaggttctggatgggataaccggggccgggatttaatcctgtttttcgtggtcgtgatggtggccgccgcagcaatttccgccgccaccgcaacagccgtcgctgtcgttgccgcaacatccgcagttgccgcagcacttgccgcgcttactgaaaattttgtataacgcgtaggccagggccaggaaaagaagggtggcgatgatatatgttcccatattggtcagtagagttaaggaattggtttaggagttatttggaggctgtataaggtttctttgccactaggtaaacgaaccccagcaggagcaatagggcaatgccctgcccgatgccgaaggaagcttccgcataaagccatgctcccagctggtaaatcaggaaggccaggcagtacgccagggcgcacatgtagccgatggcgaagaaggtccatttggcgctgttcatttcccttctgatagcgcccatggccgcgaagcagggggcgcagagaagattgaaaatcatgaaggagaaagcgctcaggaaggtgaaggctcccgcttggaccaggcggtccccggtttccctgatttccgcatcttcatcttcctcttcttccgcttcagcagcggattctccggaaccttcctccagggatgcctggagctcccggccggcgggggacatttcctgcgtttcgggggagtcctccgttttttccgcttcatcttccccggaactgccgtccgcatacaggacgccgaaggtgcctaccacgttttccttggcaatcaatccggtaatggtagccatggtgggtttccattcaccccagcccagaggctggaagacaggcgcggccacattgccgatggaggccagcatgctgtcattctgctctacggaatccaccttccagttatagctggagaggaaccagatcagggcgctggacacaaagatgacggtcccggctttttgcacgaaagccttgcagcggtcccatgcatgaatgatgacgttcttccaggccgggatgtggtaaatgggaagttccatgacgaagggagtggggtccccggcgaacatggcagtctttttcagaataaggccggaaaggatgatggcgcccaccccgatgaaataggctcccggagccacccaggaattttccgggaagaaggctccggcaatcagggcaatgatgggagttttggccccgcaggggatgaacgtggtggtcatgatagtcatgcgcctgtccttttcgttctcaatggtgcgggtcgccatgactccaggaacgccgcaccccatggaaacgagcatgggaataaaggatttcccggaaaggccgaatttgcggaaaatgcggtccatgatgaacgctacgcgagccatgtagccgcaatcctccaatatgcccaggcacaggaacagaaccgccatttgcgggaggaagcccagaacggctcccacgccggcaatcacgccgtcctggatcaggctttccagccatggggcgcagccggcgttttccagcaggcttcctacccattccggaacccattccccgaagaaagtatcattggcccagtctgtgccccatgcgcctatcgtctgaatggagatgtaatatacagcccacatgacgacggcaaaaatggggaggcccagccagcgattggtgatgatgcgatcaatcctgtcgctgcccgtcaggctgccggggctggctttaacgacggcgtctttgatgatgcgggaaatggaattatagcgttcattggtgataatggattcactgtcgtcatccatttcccgttccatggtttcaataatcccgttgatgcgggattgttcctcgggattgagcgcgagctggtccgcgactttctggtctctttcgaaaactttaacggcaaaccattttttctgctgatccaggcattttccggtgatgatttccccaatttctccgatggctttttccagatggtccggaaagtggacggcctgcggggtccgggcgtcgtccgacgcagtcgtcgttactacggcgtctatcagttcacggatgccggtccccttgagagcgctgatttccagcacctggcaaccgaggttgcgtgcaagtttttccgtgtcgatcctgtcgccgcgcttccggacaatgtccatcatgttcagcgctataatgacgggaacgcccagttcgcaaagctgggtggtgaggtaaagattgcgttccaggttgctgccgtcaaccaggttcaggatgagggagggatggtccgtgactaggtaattccggctgacgacttcctccagggtatagggggaaagggaataaatgcccggaaggtcttcaatgatgatatttttatggcctttcaggcggccttcctttttttccacggtgacgccgggccagttcccgacgtattggttggcgcctgtcagggcgttaaagagcgtggttttcccgcagttggggttgcccgccagggcgatggtaatgttgctcatgaatggtttccttgtcttgatatatgggtgcccgtcttgctgtaaagtcaggaaacgtgcggtaatagaggcggaatcaatggatatggatgttctccgcttccgatttgcgaatggagagttcgtacccgcggacagtaacttcaatgggatctcccagaggggcgactttgcggatgaatatctgcgttcccttggtaacccccatgtccatgatgcgtcttctgaccgggccttcccccgccagtttgccgacggtgacggtttccccgatgagggcatctctcaatgtacgatgtttggtcatagaataatggttggttgttggatggaataactcaggcaacgaatattttgctggcaagcgccttgctgagcgcaatcctggagcctttgacgttgataatgaaattaccgccgttttcggaaacgatggagaccgtgctcccggcaacgaagcccaggctttctagaaaacgccgggtttcatccttgccatggattttgttgacttggcgaatatcgccgatgttgagcatggagagtggcatggtgcgtgtatgaatcaaatccggaaagaagttagttttatcaaactgataagtcaatgatattattaggatatattttttcaatcaatgtcaaatgcgtttaatataaattgtttgcgtattagtttaatctaagtgtggccagcggggaagaggcggggaatggaagtttcccggcagtgtctgccgtaggaactggaagggaaatgcaaaaaagccgcgccaatgaatgttcattggcgcggctggaaaaagagcttttcttcagattcaggaggcagggcaaacttcgccctggacgggtttgccgttgtattctccggtaagcgtcttcaggaaagccaccagaagtctcacttccttcttgtccagtttatcgtaaccgagctggtaatggtacattttcgtaatggcttcctccagagtctgtgcggaggcgtcatgcatgtacggccaggtgagttccacattgcggagggtcggaacacggaagcggtgcctgtccgattcctttttggagaaattcatcaggccgttatcgtcgttggtcttggcgcgtccggcaaagaaatcgcctttgaggtcggcgtattcaaaggactggcctcccatggcgggaccggtgtggcaggtctggcaaccaagcttcaggaaaagcttgtaaccttttttggcgttctcgctgatggcgttttcatcccctttcaggtagcggtcaaacgggctgttcggcgtgataagagttttttcatattccgcgatggcattcgtgatggtctctccggtgaatccctgggggtaaacctttttgaattctgcggcaaaagcggtgtcctggtccagtttggcagcgatcttcttccagtcatccggatgttcgtaccccatttccaccggattcaggggcggtccgccggcctgttcctggaggttggctgcgcgtccgtcccaaaattgcttggcatggaaagcggcattgaaaacggtgggggcattgatgccgcctttctggccgcggactccggtggaagtgggcaggttgtccgtcccggctttttccagggaatggcaggaagcgcaggaaacggtattgtccgtggaaaggcgcacgtcatgaaaaagcttgtagcccagggccactttggccggatccgtggggagggcgtccggaatgggggcaagaggggaaagggcgtattcctctcctaccatatcgccgaaaattttcaggcgctcatccttgatccactggagcatggcgtttttctcccggagagtgagcgtgctgccccagtgcaccatggtgtaggaagtggggggcatggaattgatttgaagcacatgttccagcttggaaagggtgacggcagtgggaggttcttccatattgtagctgcgctgcccgtccctgatatggcgcgccagcaggcctccggaaagagtattgaccagttcggaaatgtgagtgccgggcttgtggcagtccgcacatttggaattcatggtctgtgcggtaatttccgccgcctgggcggacgtcagtggcttgacattctggttcggcaggaacaggggggcgacagccgccgtcacgatgaccgtgccgcccagaatggctcctgccttgatgaaggaacatgttttgctcatgagattctcaatgacgtggaattgcccggatggtaaaaggggaaggataaaaaatcaagatttattctaaagttcgccggcctttctcaggtcttcgttaatggcttccagaacatccgcttccggggtgaaattggcggcatggtaggagctgcggaccaacggcccggatgccacgtgcctgaagcctttggagcgcgcaacttcctcataccgggcgaaatcatccggatggacgtatttgaccaccggaagatggttgcgggaggggcgcaggtattgccccaacgtcaggaccgtgacgccgtgctccagcaaatcgtccatggagcggaaaagctcttcttccgtttcccccaggcccagcatgatgccgctctttgtagacactttgccgtccacgcactccagagccatccggagaacgcgcagggaccgccggtactgggcgcggaagcggacaatgggcgtgaggcgttccaccgtctccagattgtgtccgaaaatatgcggacgggccgccatgagcgtctggatggaggagggcttctcattcaagtccgaggcaagcacttcaatgatcgtggaagggctggcttttctgacggccctaattacctgggcgaaatgcgcggcggcgccgtccggcaaatcatcccgggtgaccatggtaatcacggcgtggcgcagcttcatgtgcacgacggcttccgccacgtgctgcggttcttcaggatccagcgggccgggcttggccgtgcgggtggcgcagaatccgcaggcgcgcgtgcaccgttctccggcaatcatgaacgtggccgtaccctggttccaacattcataacggttggggcagtgtgcttcttcacagacggtgaagaggtttttgccttccacaagctgcttgacgtcccagaattcccggccgttgggcagacgaaccttgatccacgacggtttgcgttccgttccttccgcagtctcattgtcgttccagcgttccatagtcccgctagcttgccgtgactctgctgctttggcaaatgcaaagtgttttattccggacttcattccccgttttcatccggaggggaagaaagacgcgcagacaattttttccgttcttttgccgccagacgcgccgcacggaaaaactcctggagatgaagcaggcactcgtctcccagtacgccgggacgcacctcgcacttatggttcaggggcggattggaatccagcagattgatccagccccccgcagccccggtttttgcatccgggcagccgaaaacgacgcggtccggacggcagtggacgatagctcctgcgcacatggggcacggctccttggtgacatacagggtgcagccttccagcctccagtcgcccaaagcctcctgtgccgccgtcagggcaatcatctccgcatgggccgtagcatccttgagcgtctccacctggttccagccccggccgatcacgcggccatccttcaccacaatggctccaacaggcacttcccctttcacgagggcctttctggattctttcatggcttggcgcatgaaccattcgtccgaaccgggcatttccatcattacggaggttatcatggaccgggcggcgcggttctggcaagctctttctggaagattcttattgtgttttatacggtaagtgcgccatgccgcggaaaggggtggggatgaatgcgtttttacgttgattccggagaatgggtggcataagtatggactatgagcttttcagaaccctgtgccttggccgttgatttcggcggcacgagcatcaaaatgggcgtaacggcgggggatcgtattctggcgacggccgaccgcatccctactgccatgttcgaaagcccgcaggcaatcattgatgccatgattgcgtccgcccgcaccctgcgcggacaattcccctccgcctgtgtgatgggcatgggaatgccgggatggtgtgattaccagcggggagtgctttaccagcttaccaatgtgagggtctgggatagggaaattccggtgaaagagatgatggagcaggccctgggcctccccgtcgtgctggataatgacgccaactgcatggcttatgcggaatggaagcttggcgccgggcgcggcatgtccagcctggtgtgcctgacgatgggaacggggataggcgggggaatcgtggtgcatgaccgcatgctgcggggaaggcggctttccgctgcggaactgggccagaccagcattcattaccaggggaaaacgggaccgttcggcagccggggagccattgaggaatacatcggcaacaacgaactggcggcggaggcggttaaacggtatgccggggcgggaatcatcaagacggtggatgaatgcacgcccaggcatctggacgaggctgcccggtccggatgtcctatagcccttcaattatgggaagatacggcggaaatgctgggctgcctgatcatgaacctgatgtatacgctggtgccggacgccttcatcatcgggggcggtgtggccaaggcaggggatttgttgatgaagccgctgctggagaacctcaggaaacagttgtttcctctcctgatggaggatttgaaaattctgcctgccagatttggagcggaggcggggttgctgggagcgggagccatggcgatggatgaattcatggggctggggattttggaacggtttaagaaccagaaatcaacgcagactttttgttagtttgggctaatatagggcttgccatgccggagaggcaggcgtacaagcggaacaggtcatgagcacggaacattcccacgaacattttccggaaggtgcttcctgttgttccggaagctgcggttctggaagctgttgctgctccggagacgccatcgggcctgttcccgccgtgctgggcattgccctgttcatcagtgcgctggcggcgggcggcgattccctggccggtatggccgcctacgtgggctcctacctgctgataggctgggatgtactgaaggccgcctttctggggatgatgcgcggccgcgccatcaatgaaaattttctgatgagtattgcttccctgggggcgatgttcctgggggattattccgaggcggtgggggtgatgctgttctaccgcgtgggagagtaccttcaggaacgtgcggtgggcagctcccgccggtccgtaagcgaactgatgagtctgaggcctgaggccgtccatgtgaaaaaagccggagccgtagatgacgttcctccttccgaggttctgcccggctccctgattgaagtgcgccccggcgaacgcgttccgttggacggtgtggtaacgggaggctgctccgtgctggatacctccgccatgaccggggaatccctgccggtggaagccggatccggaagctccgtgctggcggggtacatcaacgggcagggtgtgctggaagtgtgtacggagcgggactggcggcattccgccctggcgcgggtccaggaactggtggaagccgcatcaggccgcaaatcccctctggaggggaggctgtcctcattttcccgcatttatacgccgctggtgatttccatagccgctctggtatttttgctttatccccttgtgacgggcggaagctgggcggacggtctgttccgcgccctggtcctgctggtgatttcctgcccctgcgcgctggtgctgtccatcccgctgggcttttttgccggaatagggagagcggcgcggcaggggattttgctgaaagggagcaactatctggatgccctgcggaaggtgaagacggtggtgtttgacaaaaccggaaccttgacggaaggcgttttttccgtggatgaagtgcttccccgtgacggcgtttccccggaggaactgctgtactgggcggcccatgcggaactctccgcctcccatccgctggggcgttccattgtgaaggcatatgaagggactctgtttccggaccgcgtggcggaactggtggaggtgacgggcggcggcgtttcagcccgcgtggaagggagaccggttctggtggggaaaaagtcttttcttcaagaggccggcgtaaggacggaggagggagaagaccatggcgtgaccgtttatgcggcgttggacggcatacttctgggatgcctccgcctgtctgaccgcgtcaagccgggagcggagcgtgcggtgcggaaattgagggaactgggcgtttccaacctggtcatgctgacgggggattcttcttccgccggaacggaagtggggcttaagctggggatggacgaggtattctgcgggctgatgcctgccggcaagctggagcatgtgcgccggctgaaacctgaaacggggctgcttgcctttgtgggggacggtatgaatgacgccccttccctcgctgctgccgacatcggcattgccatgggcggcgtagggtccgatacggctcttcaggcggctgacgtagtggtgatgaagggagatcccttggccgttccgctggggatgatgctttcccaagccacagagcgcatcattgtgcagaacatcgttcttattttgggcgtcaaaattctggtcatggtgctgggtattctggggctggcggggatgtgggccgccgtgatggcggatgtgggcgtctgcctgcttgcggtgggcaactccatgcgtattttccgggtgaagctggacatgtgacgaaagggaactctcttcctccccctgtttatgggaggatgcccccatcccgatatccggatgctgccgcggaatcttggaacagcggaagatatcctgataaaaaagcctccgttccggcgggcggaacggaggacgggggaaaaacaggccgggcagaaaatcttaccgcagccccgtcagcagaagttccgcgttattctgtgtcttggagatattttgcaggagagcctgaaggccttcccatcccggtttcatggcgagctggcggcgcaattgcatgattttgacgaattcctgttcgttatacagcctgtcgtcattgcgggtgccgctctgggaaagggaaatggccggataaatgcgccgttcggaaagttcccggtccaggcggatttccagattgcccgttcccttgaattcttcaaaaatcacttcgtccattcttgattccgtgtctaccaggcatgtggcgatgatggtcaggctgcctccttcttccacattgcgcgccgcggaaaagaatttgcgcggtttttccaatgcattggaccccaggccgccggacatgatgcgtcctcccgtctggttggcattgtagccgcgggccagcctggtgagggaatccagcaggatgacgacgtctctgcccatttccaccaggcgtttggcccgttcgataaccagatcggaaacctgggcatggcgccgggaaggttcgtcaaaagtggaggcgaataccggagcatccacggtttcttcaaaatccgttacttcctccggacgttcgtccaacaacagcacaatcagttccacttccggataattggccctgatggaacgggcgattgttttcagaagaacggtttttcctccgcgcgggggggccacaatcaggccgcgctgccctttgccgaagggcgtcatgaggtccagtacgcgcatggcggcggaattgacccccttgttttccagaaggaggcgttccttggggaagaggggggtgaggcgttcaaaatcgctgcgcgcccggtagtcttccgcagggatgtcctccacgctgatgacggaggctgcagaaaggtacttgtcatgaggccgcaatttgcgcagcctgaccttgatctgctggcctacgcgaagatgcaggggtttgatgagattgccgcccagataaatatcatccggagaggtgcggaaacttttcaccggatccctcagcatggcgtaattatccttggcttgttccatgaccccggaaactacgacttcatggccctttgccagaagctgtttccccaattcaaaaaccagctgagacttggtgagggaggccgcgttccggatgggcagcccttccgccatttcctgaagatcgttcagggggcgtttccgcagttcattgatgtcaatctgctccagaacaggggctgcttcctcctcctcccggactgcgtttccactattttcctccggagcggcagccggctgttccccggcggtttcttccggcgcgggcaggggcttggggagggtttcctgcggaatatctccggcgggggaaggggtgttgtcgagttcttcagtcatgaaaaaaatgttggtaaagtctttgggtttgctggcggagcaggtccggggggccttcattccagatgacgaagtcggccgcagccactttttccatgataggccgctgggccgccagaatggcttcaatcatatcctcccggaatccattcctgatagccaggcgggttttctgcgttcccctggaaacagccaccacgcacacggcatcttggcaatagcgcgccgaagtttcaaaaaacaggggcacgtcaatgacaaacccgtccacctccgtattctgacgcgccgccagcatttgcgcaagacattcttgatgcagcagggggtgaatgatcccttccagcgttctgcggctttccggattccggaaaacaagctcccgcagaaaatgcctgtcagcctttccggaggagtctacgctggctgggccgaagacgctggagaggggggctttcagcgtaccgccatccagcaatctgcccgcctccgcatcacagtcaaacaggcgcaggcgcgcgcctcccgcctccatcagcagacggatgaatgtagatttcccggtggctattcctccggtaacaatcagggttttcatggggggaagggaaagtaaggcgcttctgggatataaagagcgggtgaaagggttaccctttcacccgctccaatatggacgttatgcacgcagcctacatgggaggcagcagaccttcggaggcgggaagggcgctttccggagcggccgcagtgggaagggcattgccgcgtacgggctggcccgtggcgtcaatgatctgtcccgttacgaagatcatcagattcttcttgatgtggttgtcggagttgctgcggaagaagcggccgatgagaggcaggtcaccgaagatcggcactttgtcttccaccgtctgcacgttttccgtgatcaaaccaccgattgccacggtatggccgtcgtagatgaacagggacgtttcaacggacctcttggagaagatcggctgctcgatgcggttttccgtcagcgtcagggacatcggcttgccgtcggaaccaacgccggtggactggatcgggctgccgtagttcacgaagccttcaaattccacgatgctgggcttgaagttcaggtcgatgatgtacttgttgtcgccaatggtaggcaccacttccagagttacgccgacgggcttcatttcaaacacgccgggggtggcgggagtgacggggaagctggatatctggggctggatctgattgcccagcaggccgtccacgatgttaccgttgttcccataaccgtaaccgttgttatagccgctgttgcctacggagttggggagttccggcggttcgtattcggtgggataccagaattcgcggatgatttcaatcttggcggtttcaccggacttggcggtcacgctgggggcggtgaggacgtcagagccttttttctgggacaggccgcgcatcagcatctggaaggagccttcgtcataaatgcccgtcagggacatgatgccgggagcggcgtttttctgggaggcttcagagcggttggtgctgttcagcagattgtccacggagttcttggtgatggcgtagtcacccgtgcggttgccgccggtaacgaggccgttgatggtgtcgctgccgctgtttacaggccagccggtcacgccgccgggagactgggtaaagctgtcggaagtggaaccggtgccgtagttcgtgccgccgcccaggaaggtgctgcggtcattgcttacggagaacggggtgacaatccagtcaaagccgagttcttccgtgttttcctgggttacttccacgaacttggtcatgatgcgcacctgctgggattcgccgcgggtgttttcaatgagctgttcgatcagatccaggttgccggaagtgttgcggacgaccagggaggaattgccgttgacaaggaatgccgtggcgccttccgggaagctgatgccgctcttctgcagcaggctgcggatggagggcatgggcttaaggccggaggagctttcgccaccgccgccaaaggggtcgtcactgacttcgccgccgccgtcgccgacggtggtgcggagagcggactggaagcccgggggcacggagaaggtgcgttggtacagatccacgtcattaccgccggcaggaaggatggtcactgcatagtcttccaccttctggcgcaggccggcattgctgcagatgaagcggagcacttccagcatgggaacattggtcagcttcaactggccgattttgcgggtgcggatgctttcctgcggggctgctgccggagcagcttccgtgacttccgcggtttcttcgccaaaaccgtcttcatcagttgcgggaacggcgggggcgacggcagcgggctgggaatcattgatgacaaagttgatgccgcgttcaccgttcgggcctaccgtgcggtccagttcaatggactttttgcgcagatagtcaatggcgtcttccacggtggtgtcttcaaaagagacggaggggatgatgatgctcttgagcttcatcagattggccgtggcgccgttgatgtccgtgatcggtgcgttgtcagtgccgtcggctccggtcgggacttccatcgggatggggcgttcccacatcttgtccacttccgccagcatggtgctgcgggtttcgtcgtaagcggctgcatagtaagccattctgcggcggttgaccgtttcctgtccgcggcgggccgccacgttgtacgggtcgatggagagaaccttgttgaattcggcgatggctttgtcgtagtcgccgagatcatagtaaccataggccatgtgaaggagggtgttcaccttttccacgtttttcacgtgttcgggggtgagcgccggattcgtgcgaatcgggtccttcatgtattcgagcgtctgcttggcaagcttggcgctccggggattgagcttgatggcatcctgcagaagcttgtcggcttcgtcatagcgccccactttgatgtattcctgagcaacggcgatgctggcgtcgccaatatggttggcgatagcttccttgcgctggtcgttgatcggcgcggaaggcagcatgttgtaagcggcgttgtatttgtccagggcttccttgtacttgccttcgcggtacaggttgcggccttccgcaaggagctgcatggcttcctgggtttgcgcttcgcggcgggccatggctgtgcgcgctgcactggactggtattggtaactgcccggtccggcgtaggacgatcccaaggcactggaggttccgacggcgccgccatcaccagcctgcgcaaacgggcaggaggcagcaatggccatcagcgcgatcagggaacgcttcggttgataaagtggtgcgtggtccatagttaggttcttctttttacatgtttttcggatttgtgaagcttttttttcagaaaagtttaaatccggctctattttttcttgctcagtgttgtttgttctccagtggttttgttggcaatggttacggtctgtgtagcattatcaacggttttcagcgtgtagatctgtttggcgtctcccggaatccggaagtcggaaccttcctctacttcaaagctggtatcccgttcggggccggccgtgatagtaaggtttactttcttatcaatgattggaatgacgtattttgttccgcgcctgatggtgtaggtttgtccgtttttggtcggcttcaaatccttgacgacggcttcctcgtccgtttccaccatgtccaggctgggattcttgaattcctttttgacaacgctgacaagttcgaacctgggctcgtcttttgtattcttacgggtaccgaacttgccgttggtctggacgatgtttttccagatttcctgtttggcgcggttcatgcccttaaaggtaaagtcattgccatccgcctgggtgaaagccaggtagaagccgaactgcttgatttcgtcgacaaaaagtttgctgaccaggggaggatggctgttggggtcgttgggatgggttttggccgcatattcctcctgcaccgtaaatccatcgttgtccgggtcccgggtcaggacgtccgagtaaacgaattcattttccagtccgttgtccaggaaccatttgttcgggatgttgccgtggataggcggaccggagatgatgtcaaagggttccattcccccctccttaatccagagattgggggctacgaagcccacatacttctgtgtttcctgggcaatcggcttgagttcgtgggaggcggaaagctcctggcctacttctgcggctttcttgatgccgggaggcggttcaacggctttttcagaaacctgcgtggtgaatttgtatttgtcattcagtcccagaaaagtcagcgtaccataggcggccactcccaggcccaggacgattccggatgccaacaggattttgtcgtaattttgtttttcagacatgttgaaagtatttgctgcggttggtgttgccttggttaatcttcagacggttcctgagccttgggctggttgaagtggaccagattcagggagacctggacaaagacctgctccttgcccatgtaaggcttgatgacttgctggatggccggggctgcaggtgcggccgcctcatccgccggagtcagggaagccgcacccgtggcgggttgggcagcggcaggtttggcggctgccggattggcgatgggagggggcatcatccgttcgttgcggatacggatggagttgaccgtgaacagatagtcctgcatgccggttatggcgttcatggctttcaatacactttcccggtcgccctggaaggctatttccagaggcatgggagtccatggagcctggtcggtttcgtccgattcttccggattgttcgccggggtttcaatggggagctgggggcggtacaccttgatgaatttggacaggccgcattccgccagtttgttgaccaggctgttgatggctttcaattcaaaacccagcgtggaggccgcctgaacggaaggagcctgggtgctgtaaacctggaagccgagccaggaggatgtgtccgttatgagaatgttctttttcttgcaggaggagatcagggaatccctgaatgttttcagttcattctggaatgccgtgggcgtggtggggaccagcgcggaggaggcaaggaagggcttgtaggccgtttccaggctgcccacggccttggcatagcggttcagttctttttccagctcttcgttggatgagcggctcggagtgatttccgcagcattggcggacttgatttccttggcggcgatgctgatttttttgtccagttcactgcgtttggaattgacgatgtaccctgtcgcggataaccccaggaataagagaagccccacgcccgcgaccatggcggcgggcttgttgtctgtaatccaattgctcataaaatatgtcttgttcgggttgggtaatcttatttgttaaagttcacgggaatgggcgtttttaacggaagcaccagcttgaagggtacaaaggcccctgccgccgcgtccaccttggcgtccttggctcccagttccatgatctggcgggcttccagcttgacatctccgggcttgaaagtgaacagggattccttgttcccgtctatttttgcctggaggtcctggatgattctctggccgcccaggctgcgccggacgaatccggtcaggcggatggcgttgacgctgtaaacgcccgcttcatcctcgctggatgcgttggcggaggcctccgtcctgatgtcatccaccagggatgtatttttgtccgatgtgaaggaatccttgatgacggaatatcccgtaatttgggtggtatcctccggattgaagtgggccagcggttcaaaatccgtaaaccagtagggataatccttgtgttccgactgttccagcaggtgcctgatgatgtccgcgtagccgtagcgctgaagcgtgagctgctggtaggaagccagggtggagtccagttttttcagctcctgttctttctggcgcagggcggattgtgccgatttgatggaagtaacggtgggctggacgccggcgaggatttcctctgcctttttctcgcccatatatcctgtgacggcataagctgcggcaccaagaacggcaatggcagctccggcgatgatggcgggcatttttttctggttggcccgctttttggcaactgcggtgggttccaggtcaatattgagggaggccctgccgatggagtgaatggcggtgccgatcaatccgcccaggatgaaggcttcgcgggagatggtgttcacgtccacgccggagcccacgcccacgttgtgcatggggttgaagaaggagatcggaatgcccagtttatcttccaggaattccttggtatagggcagggaagctctgccgccgcacaggtatgccttgacgggagcgcttccgctcatctgggcgcggtaatggttggtggtccgctggatttctgaggcaagcctggtcatggccgtacggatgacggtagccagattggccgtggcgggatccagcccttccgtttgcccgttgctcatggaaacgagcccgctggtggttttcaagcgttccgcttccaggaagggaatattgaattcacgggcgatagcggaggttacgaagattccccccgcggaaatgctgcgggtgaagaaacgtccctgttcgctgtaaatcaaatccgtggatttggcgccgatgtcgatgagcatgaccggttctttctcatccggataactgtccacatacgcattgtacagagaggtaagcgcgcagtccactttgccggtggaaaggccgtgggagacgatttcatcattcagggagtccaggtcttccgccttgatggcaaccaggatggcttcccgttccagacctttggcgggaagcagatggtagtcccacacgacttcgtccagcgggaaggggacgtgctgctgggcttcaaagcggatgagctgttccacatcggtatcgtccagagccggaagcttgacgaagcggatgaaaacggattgtccggaaacggaatagttgacgacgcttcctttgacgttgagttcctggacgaggtcggcgatggcttcccctattttcgtcaggcgcaaaccttctgctgacgggtccagcactacgaggcgcgtagcatagcggtccaggataagggcgtctttggaagtcttggaaaagacgcccattgaaactctctgggaacctacgtttaatgcgacgattggtcgtgaattagccatgggtgatttctgttaaataagatgaaatgatagaattaatggagcgttattcgccgtccgccgggggggccacaggagtaccgaacggggcggggacggaactggaagccgcctgctggctgttgggcctcataatttccggataacggtcgtaccagaacacggagaaaggtgtttcatccttgttcagcagggggtaataagaggtttccacgatgctgggggactggatggtccaccatttttccatcttgccgcgttcggaggaataagtggcgacaatcttgccgttgtattccaccactacgccctggtacttcacccattttcctcttcctccttccacaccggtaatgcgcttgacggaggacggggagagatacacggaagcgtacgtgttttctcctaccggaacattgacgtatttgacttccttatacagtttcaggtactggcgggagcggtccggattgactaccgcgatgtagaatttgaacgtcagggcatcaatatagccggatttgggggtgggagcggcttccaccttgaagggaatttcaaaatccgcccatttcttcggtttcggcagcggccggggatcgtcctgcgtcaggacgttgggggactggcgcatatacagggacagcttttccagggagacccgcacctgcattctgggattgctggtggtctgcgccgatgccgcagggacgaaaagcaccgcagccagcatggccgtgatagtgttaaggatggatttcatagcacaattcaattccctgattagttacaccaaaaaccgaactgtggctagcaaaaatctcttgtttctttccatgtagcgtgtgtggagcatgacatggctccgtccggcggttctgcccgggcggtcaagaaaaaaacatgcggcatggctgcaggcttgacctggcagaggtgtttccacatgctcggcccatggcgattgattctgatctgctgaagaagttttcagaggctcacggtatttcggggcatgaggatgaagtgagaagcctggtggctcaggaacttgaaggatatggggaattttcttccgatggttccggcagcctgttctgtaccggcggaggggccggcccccgcgtgatgctggccgcccacatggatgaaataggcttcctggtgcagaatatagcgtcgaacggtttccttcagttggtggggataggtggctggtggccgcataccctgttaagccagcgtgtcctggtaaaaacccgctcgggccgcggcatccggggggtgattggttccaagcctccccattttctgccggaaggccagcgcaacagcgtcatgagcatggaagccctgtttgtggacgtgggcgctgaaagcgcggaacaggtgaagaatgaattcggtattcacctgggggatcccgtggtgccggacgtgaaattctccccgttggaaaatccgttccgggtcatggggaaagcctttgacaaccgcgccggtctttctgtgatgatagaggcattcaagaaattatgccgggaagggcatcccaacaccctgattgccgccgcgacggttcaggaggaggtgggcacgcggggcgccaggacggccggcgtcgccatgcaaccggattgcgtgattgttctggaagggccgccggcagacgacacccccgggtttgccgtgacggattcccaaggggccttgggcggaggcgtgcagatcaggctgtttgaccccacggccatcaccaatccccggctggccgccctggccgaaaaaacggctttggatgcgggcatcccattccagttgacggtgcgccgttccggcggaacggatgcggcggccctgcatctttccggaaagggtgttcccactattgtgctgggaattcccacccggtacattcatgcccataacggcgtgctggatctgcgggactaccgcgccgcggtggaattgacggtggctctggcccgttccctggaccaggaggccgtggaagcccttacccattacctgccctgaaagaaacgctcatgaatccgaccgtttacgtacatgacctggaccctgtcatctggcagataacggactcaattgccctgcgctggtatggcctggcctatttaacgggcttcatcggcgggtattatctgctttcctggctttcccgccggaagctgtatcctgtcccccaggacaggatggcggattttgttacttatgtggctatttttggcgttttgattggcggaaggctgggatatgtgctcttttaccagattcccaatcacggctggtcccagtttctggcggatccgctcatggtcctgagggtgtgggaagggggcatggccagccacgggggaatgattggagtagggctgtacacattttattatgcgtggaagcaccgcgtcaagtgggtggcgcttctggacggcctggccattgtagctcccgttgggctgtttttcgggcgcatggccaattttatcaacggggaactgtatgggcgcgttgtcccgctcggctcttcccagggaatgatttttccggcggagctttcccaggatccggacttgttcgtgcgggtggcttcccgtatttatgaaacgcccggattgttggacaaactgtccctttccggcatagccgtgccggaacgaatgactgccgcctgggtgaccgaccgggtgagggatacgcccgccatcagggaaatcgtggggcggatgatgcaggatcatgcacgctacccctcccagctgtatgaagcgtttgcggaaggtgtgtttctttttgccgtgctgtggtttgtacgggtaaggttcccccgtgcgtggaacggcttgttctgcggtatttttgccgttctttatgctgcgggcagaattatttgcgaagagtaccgggagccggattcccccttctccatgggattaacccgcgggcagttcctctccgttttcctcgtgctggtgggcgccgctttctttgtatatgccttcaagaccaggcagacggttcaggaatgcgctttctatgaacctgaaaagaaagacgggaatgaatcgtccggaaaggccgtttaaaacgggtccaggtcaaattcccctgttttgggaatactgctggcgggaccagccttgaaaatatctgcaatgcagctggaaaaaagccgcaaattccgttggtcgaaggcaaaacgttcaaattcctttacggaaaacagggtgatgggatccgtgttgtaagctttgaattccatgatgccggcgtccgtattcgtatttgacaggcgtccctcaatgcctacgtccccgctcatgaagcgccccaggatcagggaagttcccggaaggggggagaccagggaaacaagatcggacatgatgttgccgcccacgtccgtaggcttcagcttgactatggcgaggctgagagttacagatcccggaacggggcggtcaaccaactgccatttcatcctcccgcctgtctgtctggatttgttttccaacacgttgcggatgtctttctgcagcccggccctgaattgtgccgccagggacggggattccttggggaatctggctttgatatagtcaatattgacgggggctacatatactttcagccttggagaattccagacggcctgttccgagggattataccagacgcctccaaaacagctctgcctggagtccgcgtgaaggggatgggtaattaaaggggaaacgggcattgtccgggaactggaacaggaaaaaaccaaacctgttcccagcgccaggaatagccgtggaatagcgccgtgcatgcagaataagacggtatccgcccgggtggtgttcgagtcatgacccgattggcgccagggggggccggagggggtggctccggaaattccggggcggttttgtgcctcctaacggacgggtggcgggccggcagggaatgggcgaatggcataagaatagccggagcggggaaacggcacggtcagaagaactccggacgacaaggaaacgcgcaaggttgccccgtgtccggatgcatgattgacaagccggaaaagcggggcatgctgttgatatgagatacgagccgcttccttcttccttttttgccggcaaccgtgaagaacttgcttcccgcctgcctgccggcagtatgctgattctgcacgccaacgacgtatttcctacgaatgcggacggcacttttgccctgcatcagaatgccaacctcttttatcttacgggagttgaccaggaagaaaccgtcctggtcatgaccatccgggaggacggctgggatgagatcctgctgttgcgtgagacaaatgaacagattgccatctgggaaggcgcccggctctcgcaggaacaggcgagagagctgagcggcatccaggacgtgcgctggaccgatgaatatgatgcgctgctggaggccctggtgccgtccgcatccatggtctttgtggaagccaaccagcatccgcgatgcacatgcccggtggaaacgcgcaatgcccgcatgaccaaggagctgaaggaaaaattcccggacgctgttttgaagaatgtctatgaaatcttggcggacatgcggcaaatcaaaaagccggaagaaatcaaggctctcaaaaaagcctgcgacatcaccaatgaaggcttccgggaattgcttcgattcatcaggccgggggtgggcgaatggcagattgagggattcctggccaacgaatttatcagccgcggtccgcgcaaattctccttcctgcccatcatcgcttccggaaaggatacctgcgtgctgcattatatccaaaacgacaaacggtgcgaagacggcgatctggtgcttatggacataggcacggaatacgggaattacaactccgacatgacccgcaccgttcccgtgaacggaaaattcaccccccgccagcgcgctgtgtatgaaagcgtgctgaatatgatgacctacgccaaaaagattctgaaacccggaatcctgaaatcggagtacgaacgcctggtgcgcgtttttgccgccggggaactcgtcaagctggggctgatcacacccgcgcaggtggcggaaaaaccgtccgatcctcccattgtccggaaatattacatgcacgggtgttcccacttcctggggctggatgtgcacgatgtaggcgaagccaaccccgttgtgttgccgggcatggttttcaccgtggaaccgggcatctatattgcggaagaaggcataggcatccgtttggaaaacgacgtcctgatcggggaaacagaaaacatcgacctgctgggagacgtgcctttgctgcctgatgacattgaacggctcatggcccggtaaaatgggccggatacggttctgaacttgacaatggggcccgtgtgggttttcattcccgtcccatcatgtcgaagaaactcaaaatagctcttcccaaaggcagtttgcaggattccaccgtggaattgttccgcaaggccggctacaatgtgtatgtgtccagccgcggataccgcccggcctgcgacgacgacgatctggagctcttcctgatccgtgcccaggaaataggccgttatgtcaatgacggtttcatcgactgcggcattaccgggcgcgactggatttatgaaaacagggcggacgtggaagtgctgacggatcttcaatactccaaggctacctccaagcctacccgctgggtgctggtagtcccggaaaattcccccattacctgtgcggaagaccttcagggcaagcgcatcgccacggaaggcgtgggcatcacggaacgctggcttcaggaaaagggtattgaagcccacgtggaattctcctggggagctacggaagtgaaggtgccggaactggtggacgccattgtggacatcacggaaacgggaagctccatcaaggccaacaagctccgcatcgtggacaccctgatgacctcctatccccagtttatcgcgaaccgggaaaccatgcaggacgagtggaaaaaacagaagctggaacgtctggtcatgatgctcaagggcgctctggaagcgcgccggaaagtgggtctgaaaatgaaccttcctgctgcttccctgaacggcctggtagaggcccttccgtctctgcgccgtcccactatttcccatttggcggaagaaggctggctggccgtggaaacggtcattgacgaatccgttgtgagggatatcattccccagctcaaggccctgggagcggaaggcatcattgaatacccgcttaacaagctggtttactagatttttttctcaccacagtaaaacaacaaacgaaccacaatcatgggatcgctcaaaaaacgccgtaaagcaaaaatcaacaagcataagcgcagcaagcgcatgcgtcagaaccgtcacaagaagcgtttgcgttacaagtcctaaggtttgtgcgcttcgctgctcaaactggcagtctgtccgatttccggaaaattccggcgtcctccttatcgcggaaggacgccgttttttatatggacacagcttttgcatcattttcatggattcattgataaaactttttttatttttcaccgcctcatgacgatgatttgtaaaagttgtttcatgatttcctgaaataaaaaagtagtcaatgagagggagggactggaggaatttggactgactggaatcatatcaattttccgcatggaaaaagacggccatgtttttagtttttgattacctgatataaactcgtgcatggatttgtgcgtcacgggaatcgaacaggttatatctatggagacggttgcttaaaacaacgtctgtcttccatttctgttcccttttaaggaaaaccggaataatgctgattagcggaatggagcctgcgcatattccataacgcaggggatgaaaaaacaggcggatgtctcgtgggccatccctccgggttgaaaggatgccttttttccggttttaacggcaggccatgtcagactgttccgcatcggcgttttacgccgccttttcttcccggaaccttttcaggggaatggtgatggtaaaaacagtttcccggtgggggatgctggagacggtgatggctccgtcgtgggcttccacggcgcgtttcacaatggagaggcccaggcccgttcccctgatttccgaggagtggtgggtttccacccggtaaaagcggttgaagaggaaggggatgctttccgcaggaatgcccacgcccgtatccgtgacggtgatgacgcaggcgtcctgtgttttggcggcggccacagtaatggaaagtcccggctccgtgttttgcttgagggcgttttccaccaaattgaacagaatttgcgtccagtaaaaggggtctccataaagttcccaatccgtgggaatgtccatgtgcaggacggcctgttttttctcccggatggaatccagacgggagaagacgtcatccgcgcaggaggtgaggcggaaccactgctccttcagaatcgccttgtggcctgattcgagtttggagatcatgagcatgtcttcaataatgttcatcagcctctggctgttctggtgcatgactccgatgaatttgcgggccagtccgggactttcctccaccagatcgtcctccatcaggttttccagatatcccacgatgatggtgaggggcgtacgcagctcgtgggaggcgtttgccacgaagtcccggcgcatctggttggtgaggtagttctgcgtgatgttgcgcagcaggatgcgcttttctctgattggggcgtccgtgatggcgctatccagatgccacgccgtgatgccgttttgcacgccgccgggggaattggcggcgctcagcgtgaattccttggtgacggggctgtctgtatcgaatgcttcctgaacatgccccagcaattcctggttgcagaccagggcccccactttgcgcccttccagcttttcttcctgaaaaagttctttggccagcgtattagccagcacgatgtgtccggatggaccgatgagcaggaaggcctctcccagagcttccaggaagcgccgtttgtccgcgatggcctgttcctgcgcttcttccccgcgcttcagcaggcgctgagcgtcccgcaaggcttttttccgggctttcatggcggaccggcatacctggaccagatgccagttcaggtacagggaggccagaataaggatggttaggatgtagtcgatggccgacatggaaccggagtgttaagccttttcctccgggatgcggcgtcccggcagggtaaagcggtagccgatgctgcggacggtttcaatgcagtccgcatagggagccagtttctggcgcagccgcttcatgtgcgtgtccagcgtacggctctgggcctggtggctgtacccccatacgcaactgagcaggtcgttgcggttcagggtctggccttcccgttcaaccatatggatcatgagcttgaattccgtggccgtcagatctacttcctccttgtcgatatagaatttgagggcgtttttgtcaaaagtgaaggggccgtattccgcaatgacgctgcccggcgtgtgctcacaccgtttcagcacgctggccacgcgcaggacaagttccttggggctgaacggtttggtcacatagtcgtccgctcccagttccagcccctggatgcggtcttccgcctgggccttggctgtcaggaagatgacgggaatgttctgggtgcggctgtcccggcgcagttccctcagtacgccgtgtccgtccatgcccggcatcatctggtccagcaggatcagttccggcttgtcccggcgcgccacttccagcgcggtcaggccgtcataggccgccaggggcgtatggcccgcacgttccaggttataagccacaagatctgaaatggcgtggtcgtcttcagcgataagaatggttgccatgtctgttttttacgatgaaagaaagggcggtgtcccgatattagatgtgacgattcgttcacatttccccgcccgggaggcggttccggacagttaaagcctcctcttatgcaaacatactgtaacggaggcgtttccgttttgcaaggctggcccagattcaacttctcttccctgcgtcatgtgatacacttgccccgcaacagttgtattgttatgcgaagcgatagagttaaagcagggttcgagcgtgcgccgcaccgcagtttgatgcgtgccaccggaatgacggatgaggatttaggccgtcctttcattgccatttgcaattcttttaatgaagtgattccgggccatgtccacctgaacagggtggccgccctcatcaaggaggaggtacgcaaggccggaggaactcccgtggaattcaaccttcccggcgtttgtgacggcattgccatgggccacggcggcatgaagttttccctggccagccgtgagctgatcgcggacagcgtagagacgatgctgagcgcccatgcgtttgatgccatgatctgcatccctaattgcgacaagattgttcccggcatgattatgggcgccctgcgctgcaatattcctactattttctgcagcggcggtccgatggccgccggcatggcggaggacggcacagtgctggacctgaacagcgtgtttgaggctgtcgcccgctttaaggcaggcaagattaatgaggaggaacttcattccctggaatgccgcgcctgccccggcgccggttcctgctccggcatgtttacggccaattccatgaattgcctgagcgaggtgatcggcctggcccttcccggcaacggttccctgctggctacttcagaggaacgaaaggagttctggaagcagactgcacgccgcgccgtggagatggcgaaggcggacggccccctgccgcgagacatcgtaacccgtgacgctatcgacaatgctttcacaattgatatggccatgggcggcagttccaataccgtgctccatacgctggctatcgccagggaagccggcgtggagtatgacctccagcgcatcaatgatatttccaggcgaacccctaatatttgcaaggtggctccttcctcccgcttccacatgcaggatgttttgcgtgcaggcggggtgagtgccatcattcatgaaattgccaggattcccggagcccttcatctggacgccatgaccgtcagcgggaaaacgctgggtgaaacagtggagggatgcggcattgcggatgaaaccgtgattcatccgttggaaaatgcctattcccgtgatggcggcctggcgattctgttcggcaatctggctgaggagggcgctgtggtgaaaaaggcgggtgtgcatccggatatgatgagtttccgcgggcccgccgtgattttcgagtctcaggaagaggcctgcgaaggcatcctggccgggaaggtaaagtccggcgatgtggttgtcatacgcaatgaaggacccaagggcggccccggcatgcaggaaatgctggctcccacttcctatattatggggcagggccttggcgcggaagtggcgcttattacggacggccgtttttccggagccacgcacggagcctgtattggccatatttccccggaagcggcggaaggcggcctgatcggcctgctgaggaacggggatattattgagtattccattccggaccgcacgctgaacgcctgtttgagcggggaggagatcgcacgccgccgtgcggattggaaacctacctataacagggtttcctcctcctggctgagccgttaccgccagcttgccacgaatgccagcaagggggcagtcctccggcgcggggaataatagtttcccttttaacagcagccgcttcccgtgatagccgggaagcggttttttatgcctgttttccttgctctgtagtctggcaggctgcatggtcggattgcccgcatccggcattgaaaaaactgcctgggtaaagcggaaccgcttcctgtgaagggaagcggttcctaatcaacaattcatgtttttccaagaaatgttttatttggaaattctgaggcggtcgctcatttttttcagggaaagggcaattagttcattttgagtggatggatagcgtttctttatttccgatggtgaaagtcgttttcccggagttggtgatggaaagggagcgtcccttccgtctcgtcccgtttgccggaattatggataatagggtggaaacgggtttgagcggcgcgtacatttcgggaaaatagcctcttcctgcgcagagagggaaatgattttgtaaaaaattccgttgctgtccgttatgctgatgatgtaacccgttttcagtattcgcaggagggcggtcttgataagtctggtttaccggaactgatgttgcaggaaggctgcggaatgacgcaggacgggaccaggacatggcgttccttgttgaaggaagcgttggagatttccttcccggttccctgcggaaccgggaaggccggaatggacatccgttagaatgagtaactgacggagccgttgattccctgggccgtcagtccggccctgctttccagagagtatccgatgcgggccccccacctgttgccgaaggcggcgcttatccctgcgttgacgcgcagagcggtgcggcctacgttgacgccgcgcgccgtccaggcgcccaagtcactgctgacagtccctttgggattgaggcgactgagatcctgcgtcacggcaactgtcacgctgggcgtcagcgtggcattggttcctgccgcgtaggtgcgggagagggtgatgcctacaggcagcgtccagttctgggcgcgcgctccgctgaaggtccgggccaggtctccgtgttcggagaagctgtccgttttcccggtcatgaattccagcccggcaaatggtgcgatgaccagtttgttgcggaattgttccgtccaggtggcgtagatggcggctccgaaagagtcagagtcaaatttcccggcagcggaggtgtccgccaggcgggctttcccgtcaaaggatgtggttccgaaggctgcatacccgtccagagacaatttggaggttccggcgggcgtgtagcggccgtagagcatggccatgaaagaatccgcatcatagctggacagtcctcccttgtcctggaaagttccgtaagattggccgatggccactcctgccaggacggaggaggagagcttgcaatccgcgcccacggcatagccgcctgcgtcgtatttgtagccgtcaatgccgctgcgcgaatgttgatccgtccaggaacccaggccgcccacccatacggagccgcggcctgaagccaccggcgccatggcgatgggggaacccttggcgtctgcagactggacgggcttcgctgccgtaatattcagtccctgtgcggcggaaatggctccctgcgtcctgcccagggcggcaaaacccttgagagcatcgttggaagcccaggccgcattgatcacggtttccccgctgacggattgaatcatggctgccgccgcgtctgcgctggaggttcccagaagggtttcgaagaacctgtgtgcggctgaaccgtcccggacgcccgtccggacctgttccatgccggctgctgcgccggatatgttcccggaatatccctgcatgggggcggcgactccgtgcatattttgtgtcaggcggatagttccgttttcatggggcgttgcgcttgtggagacgaaagcggtgttgaacagaggcagttcgcttacttcggctccggtgatggtgacgttgtccacggaagaagttccggcggcggtgtgtgtgaggtcgcggccgttgcccgcttcatcgacattccagagcttgatggaggagtggccgttgaacgcgatgtcattgaggagtagggaggaaccttcccccatttcaatcacggcgtttccgttaatttccaacgtgtctccagccagtacggaattttccgtcagaatgacgcctgcgccattcatttcgtagtccgtcaggtcttcaactcccaattgagctccttccatgaccatgatgtcatccacttcggccaggtggcccacgatcagggagccggctccggattgctggatcaatgttccgccgaatccgttatcctccgtgtcccggcctccgtaaagcaggtcgccgccgcctgtctgaatcagcgtggcggcgccgcgcgtccacggaccgtcgtcaagggagtaatagtctgcgtcggaaatgccgctgttgatgatggtgatatcgttcgcgtccgtgtccgccagaatgacggagccgtcttccgcaaagatgtcgttagcttcttccccggccgtgttgccgtcaaagaaggatccggagccaatcagaagaatgcggttctccatcaggtggatggcgcctcccagcccggaggcggcattatccgtgaaggtgacgtccctgccgagccagatattggccccttcattttcaaagaggtcctccacattgtcgccatcctgctgcgcgaggttgcttgtcagttcggaagcgatggctccgccattggctccagccgtgttgccggagaagacagttccgtttcctaccgtgatatccagcacttccgtggtcagtttggaggtgcgttccccgtccgtataggttatggattcggcaatattgttctgggcgaagacggctccgccggatcccgctgccgtattgctgatgaagctgttgttttctccaataacgatgtctccatgtgcatagagggcgcctcccctggagatatccatggcagcggacctgcccggggccttgctgttcatgaatgtattgccgcggcccgtggtgattttgttttcgcgttccgtgacggtaactgttccgttgagaatattcccgttttcatccgtgtcaatgatgctggcgcggataaggctgttgtccgcatcgctgaaggcgctcatgtggtaaacgggagcatcttccgttccctgataagttacattgttccccagcgtgatggtattttccgcagctacggtggtcatggtcagcgtaacattgtctccaatgactacgttcccgccataagttccttccgcatattctccggaagccagcacatagtctccttccgtgttttgcttgagcgtcccttcaaaggagacggttccacgggtggaagcgccgtcgtctccaatggagccaaccgtgtcccctgcccagatatcggccatctggctgccggaaagatcgttgtcgcctgtaatttcagtattgcttccgatatagatattccctccttccgcgtaaatatccacatcgtccagcgtagagtttgctccaatggagacggtggcctggtctcccgctccggtggtcatgcgcacggtgcggattccgtcttctccttcggttatggacagggaatccagttccacggatacggcatccagtgtgacggatgtcagttttgccccttcgccgatgaagatggaaccttgcgcatccatgtcatagttttcaatggaactgccgttgccgacggtgatgtctccgaacagccccatggtttcctccatgctggttccgggaaggtaggttccgtcttcaccttgtctggcaatgccctgggaaaggacaagggcttctgtcgtgatttccgccctctccttggctgtcagcgtactgttatctcccagcagtatttcacccccagtggattggctgtcgccgcccacggtgctcaggttcgtatcctgcatcgtcacggctcccgcgctgaagtcgatccctccgtgagcgccgacggtttccgactgaccgatcaggatgccggaatcttcattttcataaacggatgtcgtattgacggcgcctgtagagatgagcgtggaatcagataaggaaatatctccatgggagacaatttggccgcggactccatcattcatggataaatccatttcatggatacggacattttttcccagatccatggcaatttctcccggtgtagaggtgactaccgtggagatgagggctcctgtttcgggatcaattctggtttctatggaggcggaatgcccggtagtgacctcattccggctgagaacggctccgtctccggccaccagcttgttgttttccagcacaagccaggttccttccagcgtggaagcgttttctatggaaagggtgtttccttcttcgtcccatccgctgagcatgccttccgtcatgttgcccacgtgaacggttccacggccgctcacgttaagatgctgcatgttcacggcagacatgtccttgtagttgaagttggagatgcttcctttcccgtctgatttgaggacaatggaggcgtctgcgggcagggagcccaattctactccttcaaagtcgatggagccggtaatggtcaacgtgtctccatcagccatctggttccagactgtttgaaattcttccagggtggaagctgtatattcggcggcgaaggtttggcttccaaggacgcacatggctgccagaagggcccggcgcaacgggaggggtaaacgaaggttcatggtttgttatattcagattaattcagggaaaagtggagatgaatgacttttccctgctgtttatgtacaggattgttaatcctgtgtttctgaatatatcccattcgttttttccgctttgggcacataaatgctcatggtgcctcggaagattgaatcaacggtttatctaacaaatagaattgtggttgtacataaagaattgtccgtaaaaagagattaatggataaaaatattgtaattttttcttgataacaggattaacaatcctgtgatgtatcaggtattaatataaaaaacatgatattcggaatggcgagacatggaaaaaaccagaaggaatatctggctgcggaaatgttattgaaaggtagcggattgaatatgctggatgctgccagcctcgcagtagagctgctgagcctgtgcggaggcagccgcagcatgcgccgggccagaaaggcaatttttctgggtgctgaggaattgaggaaaggggaaaggacggtttccttttccgccgccgtggaagaaatgctgaaggcgaagcgtaatcttcgccctacgacgttgcgcgatatcaggtatttcaccggagctttgatgcggaggtgtccggaattgaaaggttttccggtccggaagctgacgccggagcattgcgcccattttctggaggctgcttttacatcccacaggcagcgttacaagggccgggcggtgatgagcggcgttttgtccttttccctgcggcgcggatggtgcggggaaaatcctgtcgcccgtgtggactctccttcgtttcgtgaacggacgattgccattttggctccggaagagataggaagccttcggacggtggtggaagctccggaatttcgtgactgcgctccggctgtttgggtaatgttgtacgccggaatcaggccgggggaggtggtgcgcctccattggcgtgatgtggatttggaggagagggtcatttccgtaaggtcccgaaccagtaaaacggggggaatcaggcatgtcaccattcatgctgtgctctggcggcttctggcgggatacggagcagggggggcagccggactgttatgtcctcccaattggccggtgcgctggaggctgctccggaaaaaagccggatgggggctgcacaaccgctttggagaatggagtgcggatgcgctgaggcatacttatgcttcctatcacgccaaatggttcagggatttttccctgcttcagctggagatggggcatcgttcctcctccctgttgcgggagcggtacctgaacatggaaggggtgagccgcgacagggcacgccttttctgggaagcgccggaacatggctggaacaacaaaaccggcattgcaggaacggactttctatgaagggacggctgtttgactgccgcagccggaaaagggcggcatgagggagtccccatggttatgccctgggcaggaagtagccgcgctgtttttctgagatgggcatgtccaggcgttccataacggccagcatgtcttcccataccttgcgtttttcccgcgggctgtccgatctgagcaggtaactgggatggtaagtgacgcgtacgggaatgccgttaaggtcgtggaacctgccgcgcatggaactgacggatccctgttcccccaacaggcctacggcggcggtaccgcccagggctacaatcattttcggctggatgacccggatttcatgcatgatgatgggcagacatgcttcaatttcttccggcgtgggtgcacggttattggtccgctggttggggagggccgggcggaatttgacgatattggaaatatagaccatgtctctggagagccccatggcccttaatatctggttgagtttttccccggcacggcccacaaagggctcctgctgcacttcttcataatatccgggagcttccccgatgagcatgagtttcgtatggggattgcccgtggcaaagaccatggtgtcccgcagggagttgagttcccgcgccggtttccagttctgcgccagattacggaggtattgcagcttgtcttccattgtcccttccgggagggttatggcggagtccggttccctgttttgcggaaacagctccggcggttccggctttccggcaggagcggagacaggagcggctgcctgcaggggcggcggttccggagaagcgggtgctgatgcggcgggacggcctccctgtctggaagccacgtaccatgttctgagaacgtttctggcttcatccgtcaggctcgttcgcgttgttccctgctggatcagggaatcaagataatggtggaaaaggctgttcggtgtagcgctcatgggaggataaagccagattagtccataagaggccgtctgtcacgacgattcgcaggcttcccggccttcatggaacgcgcctctccgggaaatgacacggtaaaagatggtatcttttgcaagggaggtagcaaattggggctttccggttcaggaatggaaatgcagccggctctctcaaaattttacttagttcacgtatgtctttttctgaagaattaaacgatttgatggattgccccactcccctggtgcgccgtttcatggcgttgctggaaccggttgacgacgcccgcctggaggagatggcgcaggagagccggcgtctgacgcggctgcatttcggccggaccatccgcctgttcgcccccatttacctgtccaacgaatgcatcaataattgcaagtactgcggtttttcccgggataatcccattatccgcaccacgcttacggtggatgaagtggtgcaggaggcccgctacctgcacggcctggggctgcgcagcatcctgctggtggccggggagcatcccaagttcgtttccgacgggtatatgcaggaatgcctggacgccctgcattcctttattccatccctggggctagagatagggccgttgccggacgaccgttatgcggagatcgtccgtcacggggcggaacaattggccgtgtatcaggaaacctataaccgggaagtgtatgaaaccctgcatacggcagggatgaagaaaaatttcaactggaggctggactgcccggaacgcgcctaccagggcggtttccgccgcattcagataggagccttgttcgggctttcgccgtggcggcgggaggccatgtcgcttgccgtccatctggattacctgcagaagcattgctggaaatccgcgctttccgtggcgtttccgcgcatgcgtccctacgccgggaattacgagtatgaacctgatccggacttgatgctggatgaccgccattttgtccagcttatggccgccctgcgcatctgtttccccaagataggcatgtccatcagcacccgtgagcccgcgccgatgaggaatgccctgatgcatttgggcatgacccacatgtccgccattgcgcgcacggaaccggggggctacacgggcgtgggaacggctgccgcccatttgacggtgcggggcaaccgggtggatcttcccgatggccggaaagggaattgcaaggcgacggagcagtttgagatttccgaccagcgcacaccggagcaggtggtcggagccatacggaatgccgggctggagcctgtctggaaagactgggatgccgctctggatgtggtgtaggagaaccttctcccgtctcatttctccagaatgacatccatatcgccgtgatgttgtgatggagcattgacggcatgctccggctgtcatatttccggtagcgatgattcgttattattgggggaggttttggccgttcctcctgtttgcgttcggcattgaggcggtggaaaatctgtttacggtatttttcgaataccgcaacatggatttcgggttgcttcccctcctgaaaacggcgtacgtttttgtgacggagtttgccgtcaccatgtgctactggcttattccctatgccgtttatttgtggattctgccgcgcgggaaagcaggagggaaggcggacaggtggctcacctccgcatggtttttcctgtttgtgctcgccaatctgtttgaagatgtggcggaagcttttttctggaacgagtttgaagccagcttcaatttcattgcggtggattacctggtttacaccaaggaggttatcgggaatatttacgagtcctatcccatcattcctattctgggcggcattctggcggcgtccgttctggccgtctggggaatgaagaggttcctgcttcccaggaacggggcggttcccgtcggatggaaacgaggctgtgtggtgctgttcctgctggcctgcgtcacggggggatattggctggtggatatcaaggatgcggatgccgtgaacaaccgttataattcggaaatggccaaggatggcctttacagcctgttcagcgcctttctcaagaatgaactggattaccgcgcttattaccggacgctgccggatgcggaagcggcggcgtttctggcccgggagttcacggcggatgacacgtccgtgccggaggcttcgtccggcagcgtaaagaggcaggtgcgtccttccgggggggctatccgcccgaatgtcgtggttgtggtcatggagagcatgggagcgggatttttgaacgagtgccgggaagacggggctgacgtcactccgtgcctgagccgtctgggaaaggaaggcatttttttcccgaatacttatgccacgggcacccgttccgtacgcgggctggaagcaatcagcacatccctgccgccgcttcccggcatgtccatccttcgccaggaaggaaatgagcatttgcagaccataggttccatattcagggacaagggatatgatctcaaatggatttacggcggctacgggtattttgacaacatgaattattttttcgggaacaacgggtttcaggttctggaccgtaattccatggatgattccgaggtgacccattccactatttggggcgtttgcgatgaagatttgttccgccgcgccgtacgggaggcggatgaatcctgcggacgcggcaagccgtttttgcaggtggtgtttaccacgtccaaccaccgcccctacacgtatccggaagggcgcattgacattccttcccacacggggcgcatgggggccgtgaaatacgcggattatgcggtaggcgcctttgtggaggaggccagaaccaaaccctggtttgacaacacgctgttcgtgttcgtaggagaccacggcgccgggagcgcgggaaagcaggccctcaatccggaaacgcaccgcattttttccattttctacgctccggctctgctgaagccggaacggcgggacactcccgtgagccagattgacgtgctgcccaccctgctggggctgttgaactggccgtatgatgcggccttttatggaaaggatgccttgaagccttcctatcagtcccggtattttgtgagcaattaccaatatatcggctatttaaaggggaaagacatggtagtgctcaaaccccagcgcggagtggaatttttccgggacggagaggccgttgagccggatgggcggatgaaagagctggaaagggaagcggtttattactatcagcacgcttccggctggcgcaccagtttgaaggaataaggcccccgcaaggtgcggaggccgtgattttggcggcctccgcccgcgcacggaaaatgcgttcaggatttgcttccgtccctgtaatcctggagagcgtcccaatggaacgtgaagtgcttctgcatgtgcagcccgttggcgagaatgaacatgagggaaatgcggaattcgttattgttcaatccttccagctcttttttgtcaattttcatggagaatttcccgctcttttttccaaggcgccgggagaaggaaacggcatcatagtcctggttgaccgcataaggaggatcctggatgtaaacattcagagctttgacggtctgggggcttttataattgccggaaaccagaatctggtctcctttaaaagaaatggctacgtccccgacctccacttccggcttgccttcgtagaattgctgggccggggtgacggaaaacacttcacaggcatccagcagggcgcagctggccggggtcaggaacgtgggactggtcccgaacgtgtaattgcccgaacccatcagggccgtgccgtattttttaccgtccgaggcggtctgatggttgtgcggcagattaaggccgtgccccaattcgtgggccatgcctccataccatttggtcagcagccttccttcccttgttttctgccccaggtgtttgatgtcgaaggccggataatccagggcgaaacagttgcgccccatgccgtaaaagggaactccgccgggattgtcggggccgttcttttcgtcattccaggtgggcatgatgataagcgtgtgctggctttttttcctgtccggatgggctttgaaaaattcgtcaagttcctgggccgctttccagccgcctccgttttcataaggataatgggccgccggatttttggccttgtattcaatgatgttcacgcggcctggggatttgatgtccaggccgaaggaacgcgtgccatagccatgccgctgcatttccttgccgtaaaactgctggaggtaaaggagcagttcgctgaggcgccgttcataatccggaacgggttccgtatcactgcccagaaaataaacgatattgagctgacgggccgtttttttcagggcaatccggtctttcaggacgtccggaacggtgacttccgcaaaggatgtaccggaggctgctcccagaaagaacagagaaaaaaatgcggagagaagtcgtttcaacatacatgccaaattagaagcgtcatttttaaagacaaggaaatttactgttctctccgccattggaggaagcacccctgggccgggagggaaataatggggggaagaatccgtcatgtggcggccgataagttcggaatggctgaaagatagaggttgcgaaggcagtaaatatgtgacattgtttattaaagcatgcatttccaatctctatatttatctgccgtggcggtaagtgccgtttctttcgggtggggggctctggataagccttccgcctccaatttgatctggtccgaccaacctgcggtcattgtctatccccaagaggacaaagggtgcggtcctaatggtagctttggggtttataaaaaaccgtcagctgtttgggaagcggaggggtatcccattggcaatggtcgcgttggagccatgattttcagcgctcccggccgcgagcggctggccctgaatgaaatcagcctttggtctggaggagccaatccggggggagggtacggttacgggcctgatgccgggacgaaccagttcggcaactatcttccctttggggatttgtttgtggactttaaaaaaggcgaccagccggcttccctgtctgtggaagattttacgcgctccctggatctccgggacggcattcataaagtgaattacaaggcggatggcgtaacgtatgaccgggaggcattctccagcacgcctgccaacgtcctggtgctgaactataaagccagcaaacccggccaattcagcgcggatttttccgttaacagccagcttggagcagatatttccgccaagggatccgtcatcacctggaaggggattttgaaaaacggcatgaattatgaaggccgcgttttgatccgtcccaaaggcggtacgctttccgcctcgggagataaaatttccgtgaaaaatgcggattcctgcatggtcgtcatcgccatggagacggattacctgatggattataaaaaggactggaagggtgaatctcccgccaggaagctggaccgttatgcggccaaagccgcttctgcggattatgccgccctgaaacaggcccacatttcccagtacaagtccatgtttgaccgggtgaaggtcaacttcggaaaaacggaggaggatgtagccaagctgcctacgccgaagcgtctggaagcctataagaaaaatccggcagaccccgatctggaggaaaccatgttccagttcggacgctatctgctgttgtccagttcccggcccggcacgctcccggccaatctgcaagggttgtggaatgattatgtcaaaccgccgtgggcctgcgactaccataacaacatcaacgtccagatggcgtattggggggcggaacccgccaatctttccgaatgccatgaggccctggtcaattatgtggaggcaatggcccccggctgccgggacgcttcccaggcgaacaaggggttcaataccaaggacggcaaacccgtgcgcggatggacggtgcgcacctcccagaatatcttcggtggcaacggctggcagtggaacattcccggtgcggcctggtatgcgctgcatatatgggaacattatgcatttaccggtgatagaaagtatctggaaaaacaggcgtatcccctgatgaaggaaatctgtcatttctgggaagaccatttgaaggaactgggagccgggggcgaagggtttaagacaaacggcaaggatccgagcgaagaggagaagaaggatctggccgatgtgaaagccggaactctggtggctcccaatggctggtctcccgaacatgggccgcgtgaagacggtgtgatgcatgaccagcagattattgcagagcttttctccaataccatcaaagccgcccgcattctgggcaaggacgccgcctgggccaagagcctggagggcaagctgaagaggctggccggcaacaaggtaggcaaggaagggaatcttcaggaatggatgattgaccgcattcccaagacggaccaccgccatacgtcccacctttttgccgttttccccggcaaccagatcagcaagctcaagacgcccaagctggcggaagccgcccgcctttccctggaatggcgcggcacgaccggagacagccgccgttcctggacgtggccgtggcggacggctctgtgggcccgcctgggcgaggggaacaaggctcatgagatggttcaggggctcttgaaattcaacactttgccgaatatgctgactactcatccccctatgcagatggacggcaacttcggcattgtaggcggcatttgtgaaatgttggtgcaatcccatgccgggggcctggacattatgccctctcccgtggaagcgtggcctgaaggctccgtgaaggggctgaaagcccggggcaacgtcacggtggatttttcctggaaggacggcaaggtaagcagcgtgaagttgtattccgcccaacccaaggtgttgcccgtgcgcgttaacgggaagatgacccgcatgaaaaccctgccgctgaaatcgggagcgggatcttcgcagcctgcggcccggtaaaaagggaaatccatgatccggttttaattccggaactaaagataatcatggcttccagtcctttcgttagggctgggagccttttttatcccggacctttgcgggagggacggtgtttgtttcaaaggaggatcatgctgaatggcgcgttccgaaagaaggaattcctctctggatgtaaagattgggaagggttttcgcagggggcggtccttcgccccgtcttaaggaaagaagggctgcgctctcatttcttttccatctgcctgagcagggagcaaatggcgcaggaatggagggaacacaggtcttcatgaatttgaagcaatgcctggtgatgccaggctttcgcaagaaaggcgtgtgcatccggcctgccgcccagcagggattggtggacggagaggacttttgttcccgcctgtccggcccggagggaaagataatgctcccatgcatgttcgtcatctttcatcggaagaaggtggttgatgatgaagtccaaaattctatcccggcccatcagggccatggggcggggagacggtggggaaggaagcgttacatgggtgctccagtaggggtgtgtaagggaggagaggtacttcgtcagctcttccgtatgtccggtaacgcaaagacgcttaaacgcatcaaaatctgctgcgatgacggccagcgcccctacgcgcctctgcggatggttggccggcctgttgccggaatacgtccagggaaaggagcggtccggtgccagttcaaattgcgcccgcaggggccaccattgagcccagagttttttgtggagttctacggcttccggtgtgcaggaggccggaagaacgggaaggaggaagcccgccgtaccgaaaagcagggcttccggacagttccggatggaacgcaggggcacccgcagggccaggtggcgcatggcggttttgttggcgtgatagcccagcgtttccgccaggttttcaaaaagggcctgttcctctcctgcgtatttggcgcgttccgcatggcggcggtgcttgttccggaacctgtaggctgccgctgattggaggagtttttccagaaactccggagccatggatgccagcagtccggagtggcggcagtggcgtaccggggcgctgccggaaggggatgttcctgaccgcgccagcgcagcggggggaatgacagccagaggaacgcgttcatgcctggcattgcgggtgaaccatttactgcggctgggcgcgcaggcgaggtgcaggataacgccgttaaaccccgggttggaaccgtgcccgtggcgttcccagtcttccggcgtgggatccagttcgatatctcccgattgcgggacgccattaatgcatatcctggcgtttagaaagtccggtccggcggatttattccagttcccgaaatccagaatgtgaacgtccctgcctgagtcatccgtaaaagaggttccaaatactccttccagcagaagaagctgaagggtccgctcgtccggaagggcggaatgattggaaacggaatgttccctgacggcggccggcccttcttcccttgctgcggaaagggcttcctcatacagggaggccatggagcgcaggtccatgtggaggggaggtatttttattgatctttctgccgttccaattcttctttcaggcagtcggttacgttgcggaatttttcttcgttctcttcgctcatttcgctcagggtcaaatgggagttgagaacgtggagagtttgctccttggcatccaagtgaacggaaggggcgttttcagtacccagggcggcacgtatctgctctacttttcccctccagggggctgtgggcggttcaatgctgagcagggcgtccagccccaggctttccagggcgctcaggcagcgttcgctcggggaagcgatttggacggatcccccgatgggaagcagccgtcgcgacaggcccgcaagagtgcccatgaaggtggagtcaatgccggagcaagtttccagatcaatgacgatcagacgccctccggaagcgatgtaatcgtcccccagggatttgacagtcggactattggcaaaacttccgcgtccggaacaccggatccaaagaaattcatcaaaaaggccgaaaaggatggaagaattgttattcacgtcgttagaaaatggaaaccatatgaataacaagagaaacctctgcggtcaagtcaggatttaatttgcgcgccgccggaagagggttcgttttctcgcatgcagaaccttttcccgcggcgctcttttcgttattcggagggatgcctcaggagttcttggtgccttcccccgtaccgggcaggaaacggtaataggtttccagcatcagcgttgccaggcactgacggtagatgctttcagatttgttgctcatgccggaaacgtatcctacgtcatttttccggaaactgccgtccgcattctggccgctgagcacggcgtcccggaacgctttgttgtacgaggtccatacgtctcctccgcggttcatggcagcctgcacgcagtagtaatgcatgtagagattgctcttgacgttttccgtgccgcttccctggccccactggagagttttgacgttgtttttgatccagtccagacccttgcgggcggcgctgtccgagccgttgcccgtcatttgcagagaaagcacgcccacgcctaccagggaagaacggggcatattgccgttttccttataggaaaatttgccgtccggcatgacgttcttgcgcacgtagcttgaggccttgcgcagcgtagagcggatttcccctttggtaggcctgacgccgccgtgttcggcagccttgagagcctgcacgttccatccggtgacggaaaggtcgatgtccggattaatcttgttgttgtagctgtagccccagcccccgttggggcactgggcgtcaataatcctgtccacggcttttacgacgaccttttccagattggagatggaggggatgtccatctgtttacagaaggtgtaggcttcgcacagggcataggtggctaccgcgtggtcataacagatttccttcagggcgggctgttccgaaaggacgggatttttcatgcctaagtccacgaggaaggaaatgcccttcaggacgttttctccgaattcctcggaaagaggggtttcgcagtgggccagataggccagcagggaaatgccggtcatggaagcgcggaattgtccttcaccccaggagccgttgccgttctgctgttttttcagccagcggagggatttgactacggcttcctcacactgcggggtgcccccgttttccgtaatgcgcttcatgcggtcgttcaaatcgcagcgcttggagatgatgccgggaatgcctcccccgtctccgtcgcccgtgccggtgccgaagccgtcgccgatgtcgatgcccatggagagttcttccgaggggacgtccacctcaatatccgggttgaccaccgcgacgtccgccgtagcgacagcggcgatgaccttcacctgcgcggaggtggaggaactgctggggcgctgggtggtctgggtgacttccggcgtgtcgatgtccgggttgtcgccttcctgggtggcgtaggcgaccatggggggatcttccggaatggccacgatgatgtgcaccaggtagaggaggaggcccatgagggcgatgccgaggaaggagacggaaatggcggcggtcagtgtcttggtccgctgcttcttcaattccgcaagggcattttcagtactttcaatgtggagactcatagagggaggtgtctggttggcatcaaggcaaaaactcccgcatttctaaaaaatggggagaattgccctgtacaggtatgtattgctggcctgcctgtttacaaggctggcagcatactaaagccagacacgcctgtctgtcaatcagattaggaattcctggtgccttcccccgtgccgggaaggaagcggtaatacacctccagcatcagcgtagcgaggcactggcggtaaattttgtcgttgatggaacctccattgctgttcacgagcccccccggtcccgggaatccgttcggggtgaagcttccatcggtggcctgggctccgagggtggaatcacggaaggccttgttgtacgctttccatacatcccctccgcggttcatggcggcctgtaccccgtaatagtgctggtagaggttggaggaagtattgttcgccttccagttgaacggctggttggtgttcttaagcatccagtccagtcccttgcgggcggcgctgtccgaaccgttgccgcacatttgaagggaaagaacgcctacgcccaccagggagggacgtgctgcggcgtcttccctgccttcctgcatgtaggtgaagaggccgtcgggcttgccgcatttccggcaataggccgcggctttgcgcagagccgtgcgtatttcgcctttggaggggcggatgccgccgtgttcggcggccttgagggcctgtacgttccatccggtgacggaaaggtccgtatgagcgcccgccttcgtgttgtaattgtaggcccagccgccgtcggtattttgattatccacaatcttatcaacggcctttatgacgactttttccagattggagatggaggggatgtccatctgcttgcagaaagtgtaggcttcgcacagggcataggtggctaccgcgtggtcatagctgacttcgttcctctggggaaccagggagagaacgggatttttcatgccctgatccaccaggaaagagatgcccttcaggacagtttccccgaattcttcggaaagaggcgtttcgcagtgggccaggtaggagaggagagccatgcccgtcatggcgcatttgtaattatggggagccccgccccaggaaccgtctttattctgctgttttttcagccagcggagggatttgactacggcttcctcacactgcggggtgcccccgttttccgtaatgcgcttcatgcggtcgttcaaatcgcagcgcttggagatgatgccgggaatgcctcccccgtctccgtcgcccgtgccggtgccgaagccgtcgccgatatcgatgcccatagagagttcttccgaggggacgtccacctcaatatccgggttgaccaccgcgacgtccgccgtggcgacagcggcgatgaccttcacctgcgcggaggtggaggaactgctggggcgctgggtggtctgggtaacttccggcgtgtcgatgtccgggttgtcgccttcctgggtggcgtaggcgaccatggggggatcttccggaacggccacgatgatgtgcaccaggtagaggaggaggcccatgagggcgatgccgaggaaggagacggaaatggcggcggttagtgtcttggtccgctgcttcttcaattccgcaagggcattttcagtactttcaatatgcaggctcatacagtatgtgaagcttcctgaaaataatagaatgttttcccggttgaggcgagttcaaaaattttgatggtctatagggtggtaaatgaccagatatgaacaaaatggaattttataatgaacggcttatattggttgcatcatatacccgacgggggcgtctgccgggacatgggctgtgtttctggtttgccggagaggaatggaaaaggctttttgaagccgggaaggagaagcagcacgccgggaaccgtttgcctttgaatgttttttagctgtggccggcagaggaagaaagagcggttccgggagaggagcgtacgaaaaaatttgaaaaaacaagccctgccatggagggcatggcagggcggaaaagagggtggccttttgcgggcagaggcattaatagtggccgcggcgcgggccggtcatccacttccatgcggtttccacaatggctccggcatccttgcacctggcttcccagccgaggatttccttggctttcttcggattggcaatcaggcggggcgggtcgccttcacggcgcgggccgtagcggacgggaatttttttgccggtgactttttcagccgtttccaggatttcccggacggaaagtcccaggccggttccgaggttgaagcattctgtggccccgcctttcatcaggtagtccaccgctttcaagtgggcgtccgccaggtcgttgacgtggatgtagtcgcggatgcaggtgccgtccggcgtgtcgtaatccgttccgaagacttcgatgtattccttttccccggtcagcgtgagcaggatgttggggataagatgggtttccggttcgtggtcttcaccgatcaagccgtcttcgctgcagcctgaggcattaaaatagcgcagaaaaacgcttttgagaccccaggcgcggtcgcagtccctgcaaactttttccagcatgtacttggaactcccgtaaggattgataggatcctgcttttccgtttccgggatagggatctgggtgggaacgccatacgtggcgcaggtggaggagaaaacaaagcgcttgacgccggcggcttgcatggcgcccagaaggacgaggggcctggcgatgttgttcatgtagtacttgagggggttctggacggattcccccacattgatgaaggcggcaaagtgaatcactgcgtcaaagttgcccttcatcaggagaggatataccacggaggcatctcccaaatcccctttgaccagtttcacttccgggtccacgagggctcccgcgtggccgtacaccatgttgtccagcacggtcacgtctgcgccggttttgacgagctggcgtaccgtgtgggaaccaatatatccggctccgccggttacaagtactttcatgattttatcaaatttgctgttgagccggtttaactttttctccggcaaaggcgtccggacattttggagtctgcggaaccttccggttcactgcaggctgaatccctgttccagacgcctgtaaaagtgacatgttttcccctttttgtcaatttgcgatatatcttgccgccgtctctccgttctttgtctgcggcggttggagcttctccgttttcatgccggaaactgccccgctttttactggctcctgacaggcatttttgcgaacatcacttcattatgaaaccgtccgagatcaggaatgttctggaagaccatgaagtgcgccccagcaagtccctggggcagaatttcctgacggatgaaaatgtggcccgctggattgtggagcagctcgaaatccggccgcaggattgcgtggtggaggtagggcctggaaccggctccctgacggaacatgccgcacccctttgccgcaaactggttctggtagaatttgattcccgtctggcggagtaccagaaagagcgctgggccggtgatccccatgtggaggttcaccatgcagacggcgcttcctgggatccgcggaggctgtttgcggaggctcctgtcaaattccttggcaatcttccctattccgcggggggagccatcctccagaatttcctgtccaggcccagtgctgtggaacgtgccgtggtgatgctccagaaggagtttatcgaccgcattctggcgacgccggatgatgatgccttcgggctgttgtccctgcgcatccagaaaaactggattccccgtgcccttaaaaccattccgccggaagcgtttcatccccgtccgcgtattgattccaccgtgatgctgcttactccccgccctgcccgcgagctgcctccatatgacgaccgcctgatggatgaactgatgcgcaaggctttttcccagcggcgcaaacaattgaaaaaacagctccccgcttctcctccgtgggagggcgtggctgcttccctgggactttccccttccgccagggctgaggaattgaatttgtcccagtgggtggaattggcgcgcgtttatgataccaatcctctcaaggatgtggcgcagagcggagatgaattgtttgacatcgtggacgaactcaatcaggtgacggggcagggcacgcgccgggaaatacatgaaggcagccttcgtcatcgcgccgtacatatgttcctggtcaataagcatggagctgtgcttctccagaaaaggtccctgtggaaagacaggcagccgggcaaatgggattcctccgcagccgggcatctggatgccggggaaagttatgaggaagctgcggtgcgggagctgaaggaagaactgggggtgtccggctgcgggctgcagaaaatcgcggattttgacgccggagaaaataacggctgggaattcatctccctctatgaagggcggtattccgggaaggttcgttttccggcggcggaggtggacagcgtgcagtggttcacgccggagcaaatccaggcgtgggtggaacgccgtccgcaggatttctcgcctgcgttcattccctgttggaatgcatggctggccgcgaatagaaaaaatcattctaactcaaatacatatcatgataaaccctgatcaattatctccggaacagatccagaccatccggacctgggcggaagaaggactggatttaaacgccatccagaaaaggctgcatgaggacttgaacatcaagctgacgttcatggatacaagattccttcttcaggatctggatatccgcatcagccagccggagccggaacccgaagccgagcagcccggagagcttcccggaacaatgcctccccctgcctccctgctgggaaaaacccaggtaactgtggatgaaataacgcctccccacgccctgatggccggcaaggttttattcaagagcggcgcccagggcgcatgggatattgaccgtaccggccgtatcaactgggacgctacgcttggagaacctacggcagacgacctgagggaatttgaaacggaactgcaatccgtcattcgcagccgcatgggagccatgtgagggaaacggaaaatattccgcttgaaatggactggaagcaggaacttgccgggtggcggttatttccaataaaagccttggctggaatggaaaatgccgcgtccgcatgccattcgggagagaatgtctgcccggaaaaaatgcgcgttcatttggttccatagtaaaataaaagcaacaaaaggactatcatggaaataccggaggaaatgattgaaacgctggtgcctgccgttcgggagcagctggagtcgccggacaccgcttatgtcaaaaactgtctggaacgcctgacggggcgggaaaaactgggagaacaggaagctctggaactgatggcgcaggctctggccattactattaatgcgatggtggtggggggccgctcttttgattcgggaaagtacaaggcgctgttgaaagatctcccggctcttccggatgaggctccgtgataaatctcgacaatctccggaattgattcataatcctttctttcacttgaaattttatggcaaaaaaaccattagaaacaggtgctccggaagcgtccgcagctaaaaaaacggctgctcgcaagacgacggccaaaaagacggcctctaccaccaaaaaggccgccgcagctgaaaaaaaagctgttgttgacgccgcttccgtagaagcacccaaaaccaaaatcaaaacggtcaagtccgccccgaaaaccgcggtgaagacaaaaaccgcgaaaacagccaaaaaggcggctgatgaaaaggcccctgtctctgaaacggttgttgccccttccgaggccccggctccttccgctcccgtggaaaaggagatgatgcccgaagctccccagaagccccaggctgccgctccggtcaaggtcaagcgggaatcgttccgccccaatcgcaatgcggaacagcaggagcgccatgaacagcatggcggagatgtttttgcccagccggaaacagtgggcggcgcctccgaagggccctttaacaagcgcaagcgtcgccgccgcaataagaaaggcggcggttccgaagaccgccagcccatgcaggatgccgcttctctcaagcagttggattgtaagaaggtggcttcccgagcctggaaaatgttcttggcggaagtgtctgaagaaggccttgccctgatggacgaccagacggcacgtgaggcggcccgccgcgctttccgctgtgcggaattcttcatgatggaggaagcgcgccgcaagcatgcccagaaagcagctctccagcagcaggagaaaacttcttctccggaagaggaacgggattccgaagaggattccggcgaagaataattcctgtctgtgttgatgtttttgccctgcggcggatgccgcagggcgtttttgtatcttccgggcttattttccgcagtttgaatggccgtgttttatccggtgcattgggaagcagcatgcgccaccctttgccacctgggggcaaaaagcagccttttctccaatcagggcattttttgagaatgggagagcgttggagacgcctggatgaaagcggactttatttcgtgccgttccccgttcttgttcctcctaaacctttttgcctctccatttcccgctcttgaggtaccaccatgccaggaagatcagggtaacgccgtaaacgtgttcggaaaaccagcagagagccacatccggcttgagcctgatgatgccgtaataaatgacggccgtgtaaacggccagggaaatcatttccatgatgaatcccgccttggtattgcctgtgccggatacggcattgaacaggatgaatgacggagccatgatcagtgtggaagaagccatcacatacacggaattgacgctggcggcaatcagggacggactatccgtgaaggcacggaggacggactccggaaacaggcacagtatgatgagcagggggatcaggatggcgtatgtcagtttgagagtcatgccgcaggttttgaacaggcagcgctgttctcccgctccaatctggttgctgatgagagctcctgccgtggtggcaaaagcgctgatcaccatgatcagcagggcggaaatattgcggacgatgttggtaacggccagcgggcgttcccccaaatgttcaatcgccaggaaaaaaataaaccagatggagacggaaataaaagattgcaccatggtccatccggaaatggacagcattcccttcagcagatgggggcggagtgtgaatgcccggcggaagccgtacttccgtttatccgccgtcatgcttgtgtagatgatgaaaaagagaagggagactgcttccgatacgctggaggcaatggccgcccctgctatgcctgcggcgggaaagccgcctttcccgaaaatgaggcagtaatttaacgcgacattgctcaggagcatgacaatggaattgaccgtcagaattttcgtctgggtaatccccacgtaataggctcggaacatgacgcagaggaaagagaaaaaaataccgtaggtgcgccagtgcaggtaatccgccgtggccccgtacacctgtggggattcaatgatgtcccgcaggatgatgggggaaaaatattgggatgcggcaaaaagagctaccgccaggaccagcatgaaataacagccctgaaccatggtgggggcaatcctgttgtaacggcgttccccgttgcggcgcgcaatgatgatttgtgcgccaaagccgaagccgaatgccagcatgaacatggccatgtaatacacgccgcccagagcgcatgctcccagcgccacgtcccccacgcgccccaggaagacggcatccgtcaggccgatcatatgctcaatgatcaggctgatcatgagggggtatgacatgagccatatcttttgataggaagtaaaagaaggattattcatagcgggggcagcctgcgggcatggtccgccaagggcaggcgctaaaggccaaatatttttgaattaaaatgttttcttgcaagaaagaaatgcgtttgcttccgcacatgtcatgaaaatgggggtaatgccccgggttagctgagcggcagtctggtttccggataccgcaggggggatttggttggttgtttcatgaaggccagcacgaaagccaccatgcccacacggcccacaatcatgttgaacacgatgatccatttgccggcatcactgagttccggagtgacgttccatgaaaagcctaccgtggcgaaagagctgactacctcgaaaaacaggcgttccagactcaaccgcggttctgcaaaacacatgaccgtagtcatcatgcctacccaggctccggccaggatgacggtgatgacggcccgttccaccacattgcgggcaatccggcgcttgtgcatgaccacgtctttcttgccctgtaaaatgcgcgccacctccccgcaggaaacggcaaatgcggtggtatggactcctcccgtggtggaaccgggattgcctccgatgaacatgagagctcccagaaacagggcgtatggagcgctgttgagcgccatgtccgaaatgttgaatcctgctgtgcgggccgttgcattgaacaggctctcccacaaaatccagtaccacggatcggcagacgtaaacaggctgccgtcaattattttaatcaggaacaggatcagcccgccgccaagcaccagcgcggcggtcatgcgtacgaccagccagctgtatgtggaccagtggcggctgacggtgttccgggcatcccagcccagtgcgactctggcccggcggacgatttccagatacatggcgaatcccaggctgccgcaaagcaccatgaccataatggtaatctggccgcccatattgtaggctacgcccggcgtggccaggttatccgcaaacaggctgaatcccgcattgcagaaaccggaaacggaatggaagacggcgtaccaccagagcgtgtctccctccagccccggaacatgtctccaggaaaaatagaggcctatggcgcccagcgcttccaccccgaacgtgacggcaataatattcttgatgaaccggtctacctgggcaatgccttcttcatccagcaggttgctgatggttactttggaacgcaggctcaacccctggccaaccatcagggagacgaaataagtgaacgtcatgatgccgaaagctcccacttggaaaagcaccagcaaaatggtctgtccgtaattggtgaagtgttcatgaacattcagggggaccagccccgtgacgcagacggcgctggtgctgatgaaataggcgtccgtggcggaaaggacgatgccgtccttggtagctcccggcgacatgagaagagttcctcccagcgcaatgaaggcaatcagggtaagcaggaaaagaagggcgggacgaatgcgcgggaggtggaagcccctgttccggcgggcgatgcggaaaaaatattccttgaggttcagcagaggggcagctccgtagcagaggcagagcgcgcggaaaatgttctgaagctctattttggagataaaggtggaatggaaaaagtcgcctgccagcatgaccagaatcaccagccccagccccagttctacccaccgggggttgcggatggccctggcaagccatttttcccgcaaaatgccgatgacgcccgtgagctggcccagcaccaggaaggagagaatttcgcggaaatagcgcagggaaagctggtcttcatgaatttccccgaagccgttccaccacagcagccacatcaatgcggccagtgtgcacaggccgaaccccatttccatgacctcaaaacggttcaatagcggtttttcattcgtctcattcacaagcctgcaatggtgatgcctctgatgctggggggagactactgcatacggaaagatttgagaagcccttatatcgtttccaggcggtcctggctggaggcaggaaggcgccttggaaaaaaattttttcatgtgaaggaaaatagttgccaatccggcgccgccgtgcataataagccccgttcttaccaaaccatgtgcgctcgtggcggaattggtagacgcgctagattcaggttctagtggaggcaactctgtgaaggttcgagtcctttcgggcgcaccatataaccccttttaagttaatagcttgaaaggggttacttgtttctgggggagagaggttaaaaatcttattttttgacgaactagaggacattcaggggacatggttgctgtcagaaaccattgtaagacagtgggaaataaatttcgatcccagatgcgaatctacactaatttatttctctctacaatacaatgatcatagcccttttctccgtggtcggtctgcaatagaaccttgtatcatacattagtttcctactttctgccaagacacacgacattcccagggtattcatgtggctgggtcacgcaggcaccaacatgacagaaaagcactaccgggaaggcgtacgagtagccgagggcgaggcatggttcaatgttctgccggaggatacagagcattgacttgttgtttttattgacctctttgccttgatgttataattgacttttgttgtccgccactcgtcattgagcgtgggacatcgtcgaagctataaagcttccatatgggggtctccatgatcccgggacgtacaagaaagggtggtctagctcctcatatccctctcttgagttccaaccccagcgagttcgccgggttgcaaccacaggggcatttctcataatacttcataggataattgacccactttcaccacgaaagtaggttccccggtaataaccgggagagactctcagcgtctcataaacacttgaaaggggaagttcaacagaaacttccatatattaattttactaacccttcaggaacgtggaacacttgaaggcaccatttttaccttcgaggcctgctccgagttcacaagcaacaatgactattaacccctctatagatattactgtaggtaatctacaccaaaaatcattcgcagtcgttcttcctcatgaacgaaccgttcgagaattggctaaaaccccatttacattaaacggtatgacctcacttcccagaataacggtggacaagatggttttctctgctacttacacgttgcaactcgattctgtattttcgacaaatcaagataaacagttcatcctaaagaatctgatcgaaacattgaccagttgtacaaactgggaggaaaatactccctatccaaggggcctaatatacggaggatactccgacattaaggaaaaagaagaagcatcgccaaaaccacgttttggcgagacgcgtatcaggaaaattggttacaaggtacatccaagaaaggattatcagccccattactgtacaggacgattcccgggtgtattttcccatatttccccaggatccttgacggaaccaacaaaaccggggaaattacctaaacagcttcatctccctgcgaaagatgaaaaaagcttcgatcaaaatcactatctacacctatatgaatatttggacaaggacggagttgttatacactgcgagctgaagtggacagtcaatatattctgtaacccgcaaagagcgctatatcaccacccgggactctcggcagaatggggaaatactccagagggagccatgcgctcgttctacaggaatccggatatagaatccgacaaggacaacatcatacccgaagacatgagtcaggatagctttatcaaagggatgaagaatacatgcgctggagtgttgcaaattgcctacgaatcattgattaacgctgttaatgaaactcggatgaaggaatttgtgtgtaatggctatttgccttgggagagagctttgtcaaaaggtgatatcaaactcgttgagacagactgggcatttccttgcaatgatgcaccctgttttatttcctccttacgtaaagcgtttaagtcaactgcgaaaaaagttatccccagaaactacgggaaagacaatgctactgacgaaccccgaaatggggttatcgtctactgcaaaagaggagtggagctatctatttatgcagaaagcttgaacatgatccgtgccgagctgcgacaaaaagggaacactggattcaaggcatacaagatagacggatgttctatggcaacatatgtctattcacctgtttttgagatgctaatggaaagagtctttctggcgatgaggtcggcacatcaagccttggacaaggtaataaaaagtatccatccttttgaatttaaggatccacaagaagaccctagtggattcatagcatggatgtggcaaattgagtccagagaaaaatataaagaaactgtgcaggaaattatcaaatggatcatctctggctgtgatcttcacgccgacaatctgtcggagaatgccaaaaaattattacgtcgtcacgtcgataaaaagaacttcttagctaaatcaaaaacattctaccctttcttttaatcctgagactaaggacaaagagtacacgccaaggaaggcacagccttccttgggcaagcagcgagaatacgcctcaatggttcaatgctatgatacgaatcacatagtcacagtcgagcggagcgaaggctgtgactatgtggcgtaaggagtaaggagaagccggttgaaccgatggagaggcgactcgctacacctggaatgggttgaatgcacaaacgccatcgtcttaccttcttgaaactctagaagcaataactatgcctcatatataaaccatatttcttgtttttgtctattatatgattcatattagactcatgaaaagtacatccccattgccggggccagtcaaagccgctctcaggaagctgggggcagatatccgggatgcccgcagaaggaggcgtattcctacaactcttatggcggaacgtgctttcatctctcgggcaactctgggacggcttgaaaaaggcgaccccagtgtatccatgggcaactatgccgccgtcctgtttgtgctgggcctgacggacagtctccggaatctcgtcgacgccaacaacgatcccgtgggtagaacgcttgaagaggaacgtctgcccaaacgcatacatcgacccaggtcccatgaatgatacttcgatacatgatggagaccatgcaaaatcctttccgtagcatcatacgttagaataagctccccaccgggacctttgatgtcgacaccgccctggtaggcagagatcttgtctcctccaccgccgccaatctcgatttccttgagctgctcggccacatagtcaaccaccagagcagtcgtaggaacattgcccttgttctcatccatcgttgttgccaacgttacgagcccggccttctcctgggtagccgggccaatggcgagggtcttcaatacattggctatctcaacgtcggtcaatgacatgatcttattgactagcaggaaccgggcgtcattggtcaggtcatcccagttggttccgagtcttgaggacttgccccacgcgccattcgtgtacgtgtacacgccagtggcgtcccacgcgatctgcccttcctcgcctgctacagttggcccggcaggtatcgccggggaaactgtgatgaacctggccgatagcgtgctccacggcacccgcaccgtgttcttattgccaatcactgcgacaagcgtatcgtcggcggtaagagtggcagacgatacgggaaggttccgcatcaggatgagggggatgtttgaatctgtgggcatggctattttcttagggttgcggagatcttcctcatacgtgcctggttcatgaggctattgtacgctgagttgagagtggaagcaaccctggcctgtttggcgagcgccaggacttcgggagcctgctgtgtgggctgctgtggcgtttgggcgggttgctgaggttgtgttggtggtataggctgctgagcaacaggcttgcttcccctctcatccttcgcaatatccggtactgtcttcccgtacgtcctggctatattgcgtacgactggatgcccggcccatgttcccggggcatacggagtggatgtcgtgggcaacatcggagaagaaagcgaaatatgaccctccctcttgccgaactcggccggcctcatatactcagccggaagacctttgttaacagcatccaaccgaaagagaggttgttttacacttttacgaaagtctatctcttgctttgccatcggcttcggtacatactcagccggatgctcaagctcagacaaattgatctgcggcttattgcggcgagcatagtcctctgcggaagaacgcatatagtttcgcagccgctgctcctctcccttcagatcggtgtttaccggtgatgaaggatctacctcaatgagattcgtcagggacccttccagttgtccggaagtgctgatctcgtacggagggagaccgcgctcctttgcccgtgcggattcctccctcttcctggctgcaatgacttgcgtgccttctgctggattatatgcgtaaacatcgttcgagaatcccggggacgcagtttgctggcgtctgatatgttcctcgttggaaacagtcggccagttattgacatggttggtttcgtgggaatacccggatgtgatactgggcgtgtagcctttatcgtagccgtactctctcatctgataaggaggcatggacggtgtctggtgtaaattacgtccgtcgataacagccccttcatttggcatcagtacaggtcttaatcttgcagaactgccatgatatgactttccaccagcctggtagagatccggcagaagattcgttttctccgggacaggaaggagcgtgttgttttgcgctctctgctggttaatcttctcgaagtcaagcaaacgggaataaggagcctgggcatatgctctgttgtcgatctcgccatattttggcgcaaacaatgacctcacagacttaccaacatacctaggattttgccctaatttttccttccgtgcaataatgtcaggatgatcctgtgctccgcgtatatgctcgttctgaatctcactggctctctttaagatgccattcagcaaaggaaacttcgaaaggttgggactattatgttgcatatttatacttaacagatatgatgtatttggtttttgcataccaccattttagctctcagctaaaagaaaaacaacaccctgtcgtagtagactctacaacagggtgttgtgacgttaatgactatcagatgtcttttcctttgcaagttccgcaaggatagtgtcctgcatctccttaatctcgtcccagggaatgtcgtaattaaacggatcttccgttggatgaaggccggtcatctcgcttattccaatgtcaggtagttcccgaaactcaggtctcggcaaccccttatcgtgtcgagctttcagaagccgtttggttgtttcgcgatgtaaccagtccatgtctacatcttttgtggctgggttcaacatacccccggagataacataatctccgaaagtaggaaaatcagattggactgtccgggatgcctggctgtactcttgaactttttcgcaaagaagccacacattggccgaagcaataaacaacaagataccaagaacccacaccgttaccctggcactccggggccatggttgtttagtttctttcataataagaatctcctttctttgggctattggatgattcaatcgtaaccaagtgattgcagatactcatcaggatcttccgcatccagaatctctttgataaacttctcatcttccgtttgaggagagagaaaatcctccgggtgtttggtcctttggtctttgagtttgtgtgctagtaactcgactactggaaggctgctaagtcttggcgatctcaatacaactggctgatgtctgcaaggattaggatctacgataacggcgtaaaacaatgccggaaccaatatcaggcttagaacccacacagtgatctttgcactccggggccatggttgtttgattgatttgtctttcataataagaatctcctttctcaaatgtatatgacgctcgcaagagcgatatttcgtatgtaatgctatcgttgcaaaaatagcaagaaagagataacgaaagacataaaaagtcccctgcacaagcactctcgtaacaggggactaacggaattatcgaccgttgctgccagtctttataatttgcccatcaggtggaggttgcggtgtagtcggtttgtctttttcgtctgaactcatagagaagccgacaatagcaaacgcagcaaagaacacaaacgaaaacagcaaagacatctccgctttgtagaaatgttgtccccttctgatattagtctctgcattgagtgatgtggcttcggccatcttatcaatcaaatacttatcaaaatcctccgaagaaatgcttttctcgtagtctctgattttcatggcatcaggcatggtcttcatcttacactcgtatgtcatcttgtagacatgccagaaagccttgataaacaaaacagctccggcggccacaagagcacagcaggtaagcccccagagatcccatatgaagtaggctctcagaaaataaaaggcaaacgatgctaccagagtcatagcgataatcaagaagctcgtcttctggtaaaacccttccttgatttcattctctgcctcgaaccttgacttgtggtagtcgtaggctacatcggatttcgactttaccgtctcttcttctttctcgctcatggtcataagtttactttcgagttaaaaggaacgcaatactcagattacgaatctatttcttcttcgagttcttgcagcttggtcagcgccttgcgcccgggcaggtcgactctgacaacgcgaaccagtttgcccaggctcctggcggcctcaaccctgtggtggccgtccagaatccagttgtcccgggagatgaggacgggctccttgcctgtgttgatccagtcgttggcgatgccctgggctttcgttttgttgatcttctcctgggtcttcttgagcttgtccggggaaacgaactccagcttgccggtcgggatgtcgtcgctctcttctgcgtcacaggcgcagacctggggcatctcgctgcgcggaacctcgccgagttttgccttagcgtatttgttcatctcgtcgaggaggagccgggcgttgacttgctgggcctgttgctgtttcttctgggcttcctctgcttcgcgctgttgctgggtctggtagtttacctggcgcagggcgtccgtgtacgggatgcctgcggatgaggagagctgggctgctgcggcctgggctttgatgaagtcgttgaggacacgcgctgacaggtactgatgatattcccgaactggggagcattcctgccatacgccggaagcgaagcgacggcgtatggcaaggacgggtacaccgtccttgtgggaatggttcgcagttcgggggaaccatcggcacttgtcatattccagtcctactctgcttcataaagaagcaaatccggaatcgtaaaccggaacctttgtatggcagctaaaaaacagctcttcttcatgatgaagaagagctgctgaacgggagccatgccaaactcaatcatccatagggttggaaatatccgcaataagactagatagtgtaggcaattattcaagccagataagaatgccgatgaagtgagcaaaggaaagaaaggaagaagccaacttctcgtaccgtgtggcaaatcctctaaatctcttcatttttagaaaaagtctctggacaagattcctctccctgtacaaatgggcatcgtatggtctttggtcacgacgattctttctgggaggaataacggcaatagcccccatctgttcaactgcttgaacaatatagtccgcatcgtagcctcgatcagccaaaacaaagcaagcccgctttccctccagtaaagcaagagcttgcttgtaatccgattcttctcctcccgtcaaaataaacttcatcggattaccgtgtgaatcacaaagagcgtgaatcttgcttgttcttcctcctctggatttaccgatctgttgattttttcccattggtcgtctcgcaattgatgtctcggtatttcgggcatctgatcattattatcaatttttcttaattgtttacactatctagatatggctttccggaatttttcgtctccgcaggtcatggaaatttttcggatttgttccatgatttctaccgttccagtttgctcttctatacggaaattgttcagcaaccgaacaactcgttgctgtcttccggagccttttcccgctttttgtcagtataggaacgaaggggagtaactactgtaatggagtaatgttcaaagagtgaatgccgccccttcgcctgtcctcgtcggtgattttgttgattgcgccattcattgacggaggcttcattttcccacatggacaggctgagaagtttccgttcattggtcaggcttgagaaacgttctgcccggagaaaccctctggcgtgagcaagttcttctttcagcttttcagcaatggctagataatcgttcatgccatctggtttgacggtaacttcaaataagacaagtacaggcgacattgtttcaaaagaatgaggaattacagggccgtacctttcttcgggatgaataaggaagacatgtccacgccttccaactccagcagctttatttttgtgttgatgcctccggagtaaccggtcaggttgccgtaggcccctactactcgatggcaagggatgatgatggagatgggattgtgtccgactgcccctcctactgcctgactggacatgctttttttgcctgtcttgacggccattttttttgcgatatcgccgtaggtgatgacttctccatagggtatctcgcacaaaatgttccagacattctgcctgaaatttcctccgacgggagccagcggcagttccgtaatcgccggtttttgcttggaaaaatatctgtccaaccagttccttacagcatcgaataggggcaagttgtcttttctcgtcatttcttccggaatggtatctccgtggtatttttgccccgccatccagagaccggcgagattcacgccatcgcaggcgagggttatttcgccaacgggcgaggggtgagtggtgtagtagtacatggtatttttcgattgtttgtctataaagtattccaaagattgatggtcgcgtaactgcgccaaggtcgccatgactctgccagaacaagcaattcttgagtcgtgtgggtcttgagtgcttttttcacccctaagtcagtttccagaaaaacgtccggccatcccatcgcccgcatggcgatgtaccgtgccgtccagtttccaatgcccctgatggatgtcagttttttcatttcctcttccggttgggcaaacaggttcaaattgatttgtttgtttgccaaggcaagccccaggtcataaatggctctcgatttcgccgaggtgacgcctaatgaaccgagagcattttcgatggcgcctcccagcgccaatatctcctgaggggtgggaaaaagatgcgtcagccccgctattcccgtccagacaggagtgccgtaagcggaaacgattcttgcggccagcgtaccggcagctttgactgatatttgttgccccagtatggcacgtaccgccatttcaaaggtgttgaaacagccgggaagacggattccctccatgcataagccgggtcgtattttattcatggaaataagtgtccgataaatggtattcgggtcacagttcaagtcaaacagatgccgtacccttgccagaaccagagggatgacgggcagcaggttttcgctcatggtgacggccagagcattttttcccgggtgatgctttactcgaatccacccctggacgtgtttccgttccgctgtaaacaggcctacagttcgggaatattgatcgttttttatcgtttcaattccggaaatagcccgttcggagagaaaggccagcatgtgttcccaacggtagggagggcggtatccaagagccagcgtaatgccgtcactcgggcgattgtccttcgacccttcctttcttaatgctaaaggagagaggcgatagtgtcttttgaacagatcgttgaaacacctcagactgccgaacccggatgccatggcgacatcaagtaccgacagatttgtatccgtcagcaggtttttggcaagaagcagacggcacgtctggaggtattgtacgggcgatacatggtattgcgccgtgaaaacacgccgtaaatgacggcttgtacagcccaattgccctgcaagttgatccagattccacccgctatcgcagttctgttccaatatcctgatcgcccggcgagtcaaattggcggtagaatctgtaacggatgacccgggagccaactccggacgacacaggagacaagggcgatatccgacttgttccgcttcggcggcggtggcgtaaaacgtgcaattctcctccttcggctgttttgccctgcacaccgggcgacagtatattcctgtggatgatatccccacaaagaaacgtccgtcaaagcgggcgtccttcgccttgaatgcttcatacagggcgtggttgtggttcgtcgtcgtgtccatctcgtttgaatgataccaggaaactaaaaaaagtctggccattttcggacatggtttttatttccgtgaattctggggaaattctatttcactctttcatgatgattgttctctccctccgacatctaaaaaacagctctccttcatgacgaagaagagctgttgaatggaggcgagcatcagcccgtgccctccagcgtcctgacaatttcctcggctccacgtttgtacacggtcacggccaacagctctccgtcgagaaagacggcccagaagcgggtgcccttgtacttctcaatcgtcagcatcaggcaactcctcctttccggggtgatggcgggaatcgagccggtgtctcagtacggccccgatattggcttcatacatgtcacgtgtgtgcttgttgcaggcgacagcataaaggcaccaggcatcaaggatgtcgatgccttcaccacagaaccggatgcaactttccagtgtatccagttccgcctccggaatcggtgaagccagcaggatgctttcgtcctcgtccagagacttctgctgttcttccgtcagtgccgggaggttcaccagagccgtcatggacggcccgtgaattgccagcttgctcaacctcagcgaaggatcatactgatgtctgctgtaaagcgatacagctttctcgatccgggccaatagttccgtatccactcgtggaacgcagttgagcgatgatgggtatcgtcttcatgtttcgttctcttcctttcctgtcagagttacttgcagaagaaggcgacgatgcccaggatcaacagcacggcgagcaggtacggagccacggccgccagagccgacaggataccgacgacgaccggtcccagcagacacagcagtacgagcgccgccagagcaatgaggaggtctttcatgttcatggccgtgcctcatgcgggaattcttgtccgggatgatcgacgaaccggagcggtagcggacacccattgcttgagcgcctgccgtccggcataggtaatcagccagcagtcgggacgaagaaggaattcctcttccttcgtgcggatgatgaactcccttccggccagaccacggacagcatgcctgacgctttgccgttcgataccacggcattccgccatgatctcctcgtcactgcgttcaaagtcgccatgaaggtacaggagaatggacagctccagtccggtcaatgagggagtccgccccatacgcttcactctgagatgatgttttcttctcatggtcgtctcaggtcagttgttcagggtatagctgtctgccaggtcccagagttcccggttcaggcgcgtgttgccgtcaatgccgttgagcgcacgtagggaacgtcgacggtaagcacctccttcctttggcttcaaagggactcctccccggatcaggttttcctgaacccggttgaagcactgccagacggtaacctgacctcctgtcgtaaagccgatgtcgttccatcgccggggcgacagaagagcttcgggacgtatcctgtcttcgtagtcgtctcccatacgcagctgtgccgcttcatgaacgaagtccacctgccgcctgtaggggagttcgactccctgcatgcggaggatgtcgtccatgatgcgaggcgtttcggaggccagccggagactggccgcaatcacctcgtccccggtatggcccatgtggcggatgttgatcgcggcaatacgagccccgacaatcagaccgttggtacagaccagccggaagatcccggccatgagctggtaggaacagctgccgttgtggctgttgatcatgaccacttcgatgcgttcgtcccgggtgcgttccagcacgtcccggtgggcgaagcgaatcaggtgtttgcgggtgggagtgccgtccggtttccgggtacgctgttcctgggctccgacgacgaggaacccggcttcttccatctggtcgagcagggagtcggaggagacgaagcggtatttctccgagcggctctcgtcctcgcggtcggcgaagacggagggggcgacacgccggatctggactctgtccagcgggctgttgtcgcgattgcgataaagttcgcgtgtggatgtacgagtattcatgttcattgatggttggtttgttgcaacaacaagcccgcctcccggaacaaggccgggaggcgggcacagacaggaagcagagaagctacttcctcatggatatatgacgtggggagagagggtttttcacatggatggttctatcaccaagacaagtctattcaatcgtatagccccttttgcgataaccgatgggtgtcgcaagatcctgaatgaatgcgcgccatcatttccaatttgccgtcatgattccttgttcgcaaacggtatcgtgatgttcttgctgaaactaaaaattaattaggtttgcctgcacggccatgagcattgtaaagagatgatagctataattccggttaggaataattagatgattgcgataaaatccggtttgcataaaagttatgtgcgctaatgactctaatatgaaggctaatccaacgtaaatgctgcaggttttgtcggaataaacgaaggtgactttttcggagtctgagaacttgttattctggtgctacggaggaagttgctgatttttccgtcttttgtgcttttccggaaacgatggatgtttcttcggcgggacttccggatcgtattttgatcactcttccacatcccgggcattcgtgtatagcattggaaagcgtttataatggaagtcgtgttcgcagtaggcacagttagattgcagcatggtaaaataaattcgcctaatattgacaaaaaagacaatatgaattatgttgacttttcgaaaactatgggctatgcatctaagataaaagtaatgagtgttttcttcttattttcgaaaaatttaagttaatttaactgttttttatatgagttctgttccagatatttttgtttctagattgagattagacctgaataatcctcggtggtcagggactgctaaggatgaacttgaggcaatatacaaaaacatttcatacgatccgatgcactttgaggagattttgcatggcctatacaatgaagagtatgatgcagccgaaggtaatattgttgttcagcccacggatgagtcaaatgtttatctggtaaggaacggaaacacgcgtatttccgctttaaaaatgttattgggacaagtaaaaccaaacaaaaatatattaactctcttgaaaaagagatcacaagatttgattggattagcccaaaaggatactaagtggaaaaaaacaaccgtcaagtcccatgcgttattagaactccccaaaaagcgagtgaaaaagttttaaaaatacatactagtgaggggaaggccaagcaaaagaactggagaactataaatcaaaataggcatttatgtgacgagggaaaggccagtcaaaaaacgcaaaatgccgtaagaatatttgataactttatcgagtctgatttctttaaagaaaaattaatgaataagcagatttttaataagcgaaagaaaaaagaagagcttatcgaaaatatatctgaatttgaacgtatctttccatttcttgtatttagagatgttgcaatcgcgccctatcttgaggctacaaaattaacttttgatttgttagcgaaggcctatcctaaaatgatgaaggaagaggatcaattggcattagaagattatatattaaaactttctataggtgtcattactaaagatattgctaaaaaatataaagatggagatttgagaaaaaaattttaatataaatccggtggaattaattaatactgattttattgagcaaggcggcgggcaaggcggcgaacaaggcggcgaacaaggcggcgaacaaggcggcgaacaaggcggcgaacaaggcggcgaacaaggcggcgaacaaggcggcgaacaaggcggcgaacaaggcggcgaacaaggcggcggacaaggcggcggacaaggcggcggacaaggcggcggacaaggcggcggacaaggcggcggacaaggcggcggacaaggcggcgctcctgttgatcatgaaaagacaactaatggcttaatcaaagcgctaaagccgtggagtcatgttcatgcggccaaaattgttactttgctaaaggaagccatcaaaatggagaaggatactctgcctaatagtttcgctattatctttcgaactgttgttcagttgtctgtggattttttcttccaaaacaataagctttcgcttcgaacagctaaaggtcaagaaaagtcattggcttcaagagtagaagaagtcgtagatacaataaaaggaagtttgtcacaaaatgatagtaaacttttgcaaagtgcaaagagagaattatgtgatgctaagagtgttttatcaatctctaacatgaatgacattactcatgccggaacagtggcaacaggaagtgcggttcgagtggctttttataatactgaaccgtttttaagattcatgtatgcgtaccaaccaccagaagaatcatgatttttcatagtgagctaaaagagttcgaacagaaggcgtgagatggttccattcgccaggggagaatgtgttggtgtagatgatggcgttggcttgttctttttcctcgaatgtgaggtttaagtaatcgttccaccatcgggctatgttgccgtttccagtgtttttgtcacggtagaagatgtagtggttgggcatgaggagaattttgtgaaattcatcctcgtttttgccgtaggcgtgccggaaaaatgaggggctagaacctactttacccttagtagcgtttaggatgagttgtatggctctgatgtatttccggttccagtgaattcccatgtaggttcggttggagtagtattctatgtcccgaacggggtgaaatttcatggggaaggaaaatatttttactcccagttcttctcctagttctacattgtgtttgagtctatagtagagctcgataggcatatcttcgtggttgtagagaaggtagttggagaggtgatttatgccgtatttggcggcggttctaacggcttgtgtgtagatgggttccatttcccatgagtcgaaagcgatacgaaggggacgtatggcgatttgactcaggaggcgcattttttcatctgttatgaggcgtgcgtccacaccttggttgaaatcgacatagcggaggcttttgccgggtttgaatgtttttaggtgatgctcttttatgtgttcatagacttcgattatctggtctggcttggggagaatgtatttgatattcaggaaaataccattccgggtgtagagttcggtcaattgttgtttcctctctgaatcaggcaagaccttgaggtattggacgagttgctttatcgctttaactagacgtccacggtctgtttttccttgtctgatttgctctatatttagggtgaggtaatcgggtttctcgaacttggctcctttgtggaatccggcatcacggatttcagtgatgattttttcataggctttgccggaggccatgacgttgttgtcgagtaagagtaggtgtttttgttctccgtagttgtctcgtatgatgtcgagcttgcttttcaaggggatgtagttgcggtattgcggctcgatgatgggtacaacgcaaaaggaacaacgacggatgcagccacgggtcatgtagccatagtagttaccgtgttctttgtattggtagtcgatttcgtctaggatactgtagtcaagaggaagttcatcaatgatggtgggatcttccttatcaatgatgccgggtttatcgaggagtcctatgaggaagttgttgtctgaaaggtttgtttcctgaatgattctgtctttgaggagggtggcggtgacacctccgacgtaaagctgatccaactgtttaacgagcatttttgcttggtttatagtagggatgcttatgtgccagtagaatgtgaagagggtggtgacatagactcgatcccatttccaagagggatcatccaggtaggtcttggatgtatatgcttttcttgtcgtcaggattttttgccacgtttcagtggattcaactttttccttgatgttaaccagggcatttttgcgtcctttttgtatgtattcgtgtatttcaacacaagggattgtgtggcgaggatgagagggatggttagttatccagttctccactatagcctttaccattgtagaaaggatgagttgccgtatgtcgcctttgtagaacatgacgttgtcgcctttcatcttgtgatacgtagcgagcttcattagacccaatggggggtatttgttacggtaagaaggttctatgagaaggattttcattctatggatttggacctaagttacttttgccgtgtagggtgtggaggcagaggatttcaggaggaatggaatgtttctaattggtgttgttttagcattctcgcttttgagcctgttacctcataattcaggacgctggacgaagtttagtttttccctcccttaaggcaagctgaaaaggagcctagcacagtgtaagcctgccttgaagttggcatagttcatctgcctttaactcacccattggttcgttcttcctcaaggttgcaaatggtcaatccttattcgtattcgtcgtgtaaatccagtgggtcattagcttgatagattttcccaaaggttttatgaattgatggcgctatttgtttaatctctataatgcggcgtgctactgtctgtggtattgggtatttcggtgatgtgatccttctcggcgactttcgagttatttcattttgatacgatagaggctgttcacaacgattacgcccgacatacttcggataagatgggtaggagttgtttataatttattcgtctgcagtcaatgaattgttgaatatgtgtttaattttctaatctattcgaaattgatcgtttttaccggaagctttactctttgttttatggtttttgaagagaagaagaggtacaggctgaatgattttcatgagtcagggctgatgcaggagggtatatgagataaatttgatatattcagattgatggaagcgtaactaaaaaagagcagtcgattcgacattctcttgaacgtcttccttagacaatttgttttggaaggcatctctcatcgtcacgcgatgaggttgtagatggtttgtagcagctgggcgaggatcatggaattagcagggctgatgttgagaccatggatctacctcctcttcctcgtcaaaggaaggagggcgataattgtgcctctgcttgttccgaatgaactcgccgaccttgtcggaagcatagcccagcaggtgtaggtgagttcgaacaggattattttgatcataaacatggcggctgtaggtgggtgacggcgtcaatgaggatttgttccaatacctggacaatcacctcggcaccttttttgtacacgacgacggcgagcagttttccattgtgatggagaaccgcccagtagcgcgtgtccttgtatttgacgatgtggtacatggttccggtatctggatggatgtttcttcaacaaaggcagaaccacagaagcagtcctgccgtcatcaggccgaaagccagcacgattccccttttgaggagagtgaacagccacggaaacagaaaccagtcgacgatgatcttcctgtttggtcacagcctggatgctggttgatgccggagtattcctgccgaccaaccggatgttgcccagataggtggaccactccaacaggactatccgcctgtcctaggcgggatacaaggtgcgagggaagacgaagggatcgtcttcccccgtttggcagatgaacagtccacggcattttagcaggcgaatgatttgcctgaccctccctcgttcttccgggtggaaggaaccgatcaattcttcgctcgtttgtccagatacggattgagccagggtcagaccgacagcttgcgctctcggcaattagcaggatggagtcatggaatgtttccttcctttttgtatttttgaacaacgtttatgagattaggcgtcaggcagaatcgcatagactgtacagggtctgactccgcttgacggccacatgtaggttgacggccttgaattgctccgtagagtcgttccgtttctgatggagacctcgaactggtgggaggaatatcccggcagcccgaggcgtttgctgtaattggcgatgagtttgatagccatgatgattgtttctttgttgttgatgggtggatacggtaaagccgccatgcccggtatgggaacatggcggctcttcgaagaatgacagacaggtaaatccctgtgtctgatattatatatgacggtaggagaggtgttatttcaacatgactctctggcccctatcttccataacgttcatgttgccatgattgttatgagatgaataagccaatgggagagggcaaggtatcatttggaggcagtattagataactcaaagatcttgtagaaaataacgagcgcttttcctgagcatgtcggcatcttttgctctgccattttttctcaactttgactctaattcccgggttctgtcggcgagggcattcaacttgtttcgaatcccggtattcctttgttgaattgctccctcaagtatccgggctttacgcctggcgttgtccgctcctgccggatcggtacggccagtaagagcgttgggggtcatgcatgagacagcccatgattcaaggctggatatttgcttttcatctttgatgttctgtttacgaaccagggatatctcttgctttgacctataaaggtcggtaacgacggaagcgagatcgttaagtagtagttgatcatcctcttttgcgtccttcagagcccgcttaatgttggcgatggatattttccctgcattaagattgccggacgatatatcttgtaaaactactgacttttgagcctcctcgggggaaggggaatcttttcttttcccttcatccttgctcttcacgtttgccacggcttcctgtaatgctttcacacagtccgtatggccaagagtggtagccatcatgagagctgtactaccatcctttaatttcgcgttcacatctgccccggctttcagtaatgttttcacgcagttcgtatgtcccttaagagcggctctcataagaattgtaacttcgtccttatctttcgcgttgacgtctgccccagcttccagcaatacctttacacaatcaacattgcttttagcaacagctgccataagggctgtccatccattcttattctccgcattgacgtctgacccgacttccagcaatgttttcacgcagcccgtatgtccctcatcaacagctaacatgagagccgtttctccatccttagtcttcgcgttgacgtctgccccggctttcagcaatgctctcgcacaatcagtataccctagaccggtagccagcataagagctgtaccaccattcttgttttttgcattcaaatccgctccagcctccagcaacaatttcacataatcaacattgtttttaacaacagaaactgtaagagccgttgctccattcttattctccgcattggcatccgctccagcttccagcagtgtttccacgcagtccgtatgcccctcatcaacggctaacatgagagccgtttttccacctttatccttcacattggcatccgctccagctttcagcaatgttctcgcacaatccgtatatcctagaccggtagccagcatgagagccgtttccccatccttattctccgcattggcatccgctccagcttccagcaatgtttccacgcaggccgtatgtccctcatcaacggctaacatgagagccgtttccccattcttattcttcgcgtttacatccgcttttgcctccagtaatactttcacacagtccgtatgcgccgtaagaacagctgccataagagctgtatatccatccttagtctgcacgtttacatccgcttttgcttccagcaatgctttcgcacaatccgtataccctagaccggtagccagcatgagagccgtccatccattcttattctccgcattcacatccgctccaatgaccagcaatgctttcacgcagtcagcattgttcttagcaacagcaaccgtaagcgctgttctcccatcttcatctactgcatctacgtgagctccattttcgatcaattctgagagttctgagtcaatttgcgcgatttcttccaaagccatttctttctcgtacctctcacatgagagaagaattaaagtggaaatcaacgcaagaacggcgatgcggccgattcgatatatcttcgaattcatatagttctacataggattatagtaatataaacgatatgctcgatgtgatcatttagttttattatatttgaaaatcaacttattgatgtaataaatgacaaatataacgcaagcagtagagcagatggaaataatggtcccaatgatcaaccaattctcaacagctcctcggctggatgcccctcctgaagcaacaaggacaataaaccctaatatattaagaatacaatgtgttaaaaatggccataattgaatgctttcggggcgttttaacagcttatttcctaatgagcttattttgcaaaaggcaataaatgcccaataaaaattaaaaataggaataaacagaaatcctacagcctgaccgggagaaggaatacgaatacgagcggaaatattctgcaatactttccatgccttgaaaagccggatcaatagtaagatggatgcagtcaatacagttaaccgggccccccatgaaaagatcatgaaagcattataactacgatcactgaatgccatggttaacgctatactcaggattgatgatgcgcagaaaaaactacaggcaacccagctttggggttccatgtagtaagtgacaggacgagtatccagaatatcctctaaagacacccaatctgtcatgccctgtttccaccccaactcggaaccatatagctttcctgtttttacagagttctttagttcatctaaagaatatggcccttgcttattgccatcataatccgctacataatactctttcttgaaattatagggaatagaaggagttggaggcgttggaggaatagaaacagataggggtggcatgttcggtttgcaatcggcagatctcattacatcgtttgttattttctctgcgttcgacattattgtttcaatgtgtatccatccgtccattccatcactccatacaagcgtaccttccagatatttacccgcttgataccgggcaataagagtttcttcatcatacggaccttcctgtgctttgtccggcaaggtaacgtaatactgtttattgttcatgagtttcaatgattgtgatgagatgaataaacaaaggaagccagagaaggatatcgtttcgacttaagagcaatacccttctcgacgatattgtctcaaagaggcatgccatttgacttgagaatcccgcgcccctggcagcgttggcatttctgccctccgatattgcctttgccctggcaccccgggcaaacgatcactccctgattctgctgatggcaaatggcgtcccccacagattgctgatgggaagaggcctgtgactgaccagtcatcatagccgtcaacgtaataagtgcagcaatgccgcctgtaatgtatttcttcatatcgtttcctttcgttttgtagctgttgaaccggagccacaaaatccggcttactccagaatggacgaagatggttgcagaacatgctttttgacccgcttccagttgcggcaggccaacgttcgaatcccggaatccgactggctgattaggatgccatgagctgcctgctctcgttccaatacaaatcggcgttccttctcgctgagagatccgggatgagagacctcgacgatcaccggggtcatatgaccatcggggaaacaaatcatgcacctgtgctctaccgtctccatcccgtccggccagacaatgactccggcgctttgtacctcctccagggaatgccattgaaacccttccgatgaatcatgactatggcaatccgggtgtcgacagtccgcacagcgataccccagcggctccccgcacaaatcgtccaccagaaccttgtgcccgacagccagtcctccctgccgatcggccttcagactctggacgacataacggtgcatggcccgttcgacgagcatcagttggtgacctccgcattgagggcaggtgaactggatgatacttttcattgctggcatctcgtttacattgcctgtatatctcctttttacgattttagtcaacgtaaaaatctcactttaatctcaaaaagaggaatgttgtataaccatattgccattactgagcgatagtgatacattccgaagcatggcaggagtgaatcaggatgagctgaaaatgaacgtcaagctgtggctcaaggccaacaacttcgactacgcatggcttgccgaacgatgtttcgtgacggaagcgaccgtccgcaactggatggctcagaaacccattcccgccgccaaggaacacatcatccgggaattgatcaaacagctcccgctgactctcccgagccgggtgcaggtggaagaggaaacgttgattaccctgaagcttgatccggatacccgcaaggttcttgagaagaaggctttctcccagggcaagaccttgaaggaattcctggccgacgaagtgccgaggctcggtaatcctcctctttcctgaggctatggaagatcccgactttgctctccctccgggaaccttgctcggtaattacaaacttctcaaggtactgggccggggaggtttcggcatcacctatattgcctgggacaatcagctcagacgcaatatcgttctcaaggaatgcttccctctggggctgtgcagccgggattcgaatacgggagagattatcccgttaccgcacgcaccccggcacacctaccgggcagccatggattccctccgcaaggaagcgcagatgctggcttccctgaaccatgaacgcatcgtccgggtgtatgatgtcttcgagtcccatggcagcatcttctatgtgatgccgtggctggaaggcggttcgctgcgggaacgcatggacgaagccgcttccgggaagagcactataaccccggagcaagccgccgagtggcttttgctcctgctgggtggcctggactatctgcatggcaaggggatctaccaccgcgacatcaagcccggcaacatcctctttgacgaacgggggctgcctgtgctgatcgacttcggggcggcgctcaacaagccggaagtgacccgtacgatcacccagggagaattctcgtacgcctacgcctccccggaacaaatcaccgggaaaggggaaatcggcccatggacggatttctatgcgttggcctcgacctggtacgagttgatctcgggaatttccgtcgaaccggccgacaggaggctgatgcgggatgatgtcgtcccgctcccgggcatggctctttcccagccatggccccgggaattgctggcatccattgaccggaacctgcggctcagtcctgaagagcgttgccagacagccggacagtggaaggaatggctgcaacaggggaaaccagaaaagctacacaaaggaaattcacggaaaaatactctgatcgttgcttccctcggtttactggtggttatcatcatactcggaatatggacggtaaaccgattatcagccgataaggccgagcctcctgatcaacttgtgtcagaaacaacaggaggtaacggcataccatctactctaccttccacgcctgaaattgatcaaggaacatcagattcttctgtccagaaaataaaaagccctgccatgggtattcctccattaagcaaggacgcttcagcaatattacccaaggtgctggattatttccaatgggagaaacaagaaaaaaggcttagaggccaaatcaataaggcatcacaggacgataagaaattcaaagagtttattcgacaagaggttgcgacaagaaagcaatatattgaccaattgaagtttcctccgtgtatcatggaagaagtgatcgtcgatagccagcgaaaatattattctcccgtatggtatgactccgttctactgaaatcttgtcgggactcatggcaacatgtcgccaacagcctgaatgacatgattgcaaaaacagcccaatggcaggaactttacccttctacctccatccgggaaaaagagtttgtgcaagaaatcgcatcacatgaaaagcggaaattgctcatggaacgcaccaatctaaataaactggaggactctgtcagtgattacctaaagacatcagagaaggaaatcagagattacgcctatgaaataggcaaaaactattatgctcaaccgattgtaacggaagaatggcaggctcgtgaaaagtataaaatagatgctattctcggcgagataggacaatctaaacagaaaatcattcaacaagtagcagagcaaattgataagaagaaactttttttcgagaaggtggacaacataatttcttcattcaagacccgtcaggaattacgagaatggtctgagggagacgaaatccgacaactggaacaagaagggaaggcgctggataaggaatatgaccggatcgctgaaatggagcagaattaccgtgaaaaggcaggagattatttcaactcatttgatcgcatcaaaacacttgttcctgccaacgaagtcggttggataggcaactttgcaaatgaactttctggccttgtcaaccggcctacaaaagggcttaaaggatgggagcaggatgccaacaattacctttggcgaaagattcgtcatgcttccaaaagtttttaacagcctggaattgaaaattacttgcgacccttcctgttctccagctttttgatatcctgctccagttctttcacatagtcctgttccgcctggtgttcggccaataacctgcggtgttcttcatagaagcggtattgttcccggacatgttcccgagcctgtttcattgaccggtttcccttgccttttagtacacgccttcccatgagacgaagcagttcgttaagcttgtcttcccactcatgcagaaatatctcacggcggttctttgcctgatcctcgacaaagtctagacacagggaggtcaaacgattgaaatcgctgatttcttcctcgttaaggtagttctttgcaacagtgatatcactggcatggattcggtctccaacccagctggtcaaccccatgttgggcgctgatgcgtctgcccgcatcatcatcaattccgcagcactgtgtccggtaatggcgtagtgtagtttgttctgaatcgagctgaaaaactccgtcgtttcctttccggacggcatatagtcagccgccatggcaaaaacatccttgatgcgcaggtacatgcgccgttcgctggcacgaatgtcccgaatacgctcaagcaattcatcaaagtagtccggcaacggtgtcgttccgggaatcggcgggttcttcaagcgttcgtcatcaatggcaaaccccttgatcatgtattccttcaggcgctgggtcgcccatatgcgaaattgagtgccccgtatgctattcacccggtaaccgacggaaatgatcatatcgaggttataaaacgtgatggaacgtctaacctgacgcataccctcctggcgaacttgtaagaaatccttacaagttccttccctttcaagctcagcatcttcatagatattcttcacgtgcatgatgatgttttgcacggatgtctgaaacagttcggccatcatctgctgggtcatccacaatgtctcatcatgaatgcgaagatccagacggatgttgccatccggagaagtatacaataacagctctccgggaaccggggtttcgtcttctgtcggcagatgggtcataccttgtcttcttttcgatcaatccatattgcaacccgaataacggcagtcattctggaacaacaagcccaatggagcatagcaaaaccggcatgcatgcaaagctcaaagctcacatcatccgacgactttcatcaaaaggcatcactcccatgggaacatttcttgaaataactacagccgctattttaggaaaacgcataaacttgaaatagacaagcaggttattttaggttaatcatagccatatgaaaagggagcatacgggagactacgagattacggcggtagcgggagaacaggtgaaggcgtttattccttcgccgttgccgcccgtcccgggaatagatatcagtcccgaattgcagcaatcgcatgaccaggctctgattgcggtcggtgaactcaattccctgacctctcttttgccggactattcacttctgttgtattcctacgtccgcaaggaagccgtcttgtcgtcaagaattgaaggcacccagtcttcactgtcggacttgctggtgtcggaaatggatgggattcccggcgttcccctggaagatgtcacggaagtcagcaattacgttgccgccatgcagtacggcctggacaagatccgggaaggcctgcccctgtcgttgcggttgatcagggagatgcacgaagtcttgctaagaaagggtcggggagaaggcaagaatccgggagagtttcgtacaagccagaactggatcggcggaacaaggccgggcaatgccgtttttgtgccgcctcctcctcaccgggttatggaatgcatgggtaagctggaactgtttattcatgatcccgcgctcctattgcccgttctcatcaaggcggcgttggtgcatgtgcagttcgagaccattcacccattccttgacggaaatggccgcctgggacgtttgctgatcaccctgatgctttgcgattccggtgtcctgaaagccccaattctatacctcagcctgttcttcaaagtccaccgtcaggaatactaccgtcttctcagcgacgtaagatcaacaggggactgggaagcgtggctctcctatttcctcgaagctgtaacactgacatcccggcaggcagtgacgaccgccagacagattgcccggcaaatatccgatgaccggaagatcatcgaacaaacaggccgttcctcggcaacgacattgcttattttcgaatgttttacacgaaagctgattgccgacagcaaatacattgttgcggaaaccggcctgagccccgccaccgttaacagcggtttgactcgtcttcagaaactgcacatcgtttcggaaataacaggaaagaagcgggacaagatttacagctatgcccgatgcatggaggtgttgaaccaggaacttgattgcggacaaacatctgagatattatagttatctcaagaatatgatctatagttaatttgaaatttaaataaattatgcctttttctacagaaaataaacttgttatagctgtatcaagtcgagctctttttgatctgaacgaagctaataatatattcgaaaatcaaggagagaaagcttacatggaatatcaatgggataatcgaaaatcaatcttaaaaagaggtgttgcatttccttttattaagagattattgcagttcaatggatcaaatgataaagaaaatcctgttgaagttattgttttatcaaaaaatgatccatttagtggattgagatttttcaattcttgcgaacactataaaataaacattacacgaggagtattcacggctggacgcgatcctttcccttatatggatgctttcgattgttgtttatttctaagtgctaacaaagaagatgttgataaggctattcaaatgggtaaaccggctggattgatcttacctactcaagctccagatgatcctgcaacaggggaattacgtattgctttcgactttgatggagtgttagccgatgattcaagcgagcgtatttatcaggaaagagggatagctgaatatcaacaagaagaacgggaaaatgcggggattcctgcgcctcctggtcctttgaaaggtcttatagaacggttagcgaaaatacaaaaattagaaaatatcgagaaaagtaaaaacacaaactatgttccaagattgcgtattactattgttacggcacgtaatgctccagctcatgaacgagtgattacaacactccgggaatggggaattacggcagtggaagctttttttctgggaggattagaaaaaaacaaggttcttaaaattttacggcctcatatcttctttgatgatcaaatggttcatctggaagctgccagcaatattacaccctcggtccatattcctttcggaattgcgaatcaaccaactcctaataactaaaagaaagccccccatgagagagacttcctgatgttgccagtcctatacctgccacacatcctccgggggaggagtcagagataccccgtctcccggcatggacatactgaccgtgcggacactccggctcagccatgcgaacagttccgggaacttctgctcattgacctgcatgggcgggcgccccgggctgatgcaggaaagctccgacagatcagcgcggccgataccgaagacgaacacgctgagcttgcgggcagccgtcagttccttcaatcgtccctccagttcccggtgccgggcgctggtcggaaccccgtccgtcatcacgacgagccagggctggtagtattccactccgtgtttccgataggtacgcttgcggctgtcgagttcagctagagccaattcgacggcttcaccaaggagcgtttcattctcctgtgacgtggagatcttcaggactgtgtcagattcccggattggaccgaattcttttaccgtcgctaccgtccgggcaaaggtcatgacctctacgtcagcggccagttttgccatgggatcggagaggatatcgctgatgaaccgctgaaggccggtattgagttcgtccatccgggtgacgagattgtctcctgtaacaatgttccagttgattccgtccgagtgttcctgccggaggatctgttgattgtcgcctcgaacgatgccgttcatactgctgctggcatccagcagaaagaggacgggaagccgggcgttggtgttgttgctgaactcgcgcatggcggcgagttgttcttgtttggtgggttgtgtcgatgatatggacatgatgattcgagttaatggctgatggttgaattccgggttgcctgattcaatgcgctgcgacgccgtatgcagagcttgcatagggatttggcatgagattgccgtaaacgccgtgcgacgtcgtcaggagcttcccagaagcgaataccgcagtctgtgcagatgttgggagtcatctggttcaacagactgtggggcggacagggtcggtcgtgcagaagttcccggtatatggagtgattccttctgcatcccggctccatgtccttgaggtattgatgaaaacaacgcgccagatacccgggggagacgcgtgaacgcaaatcgtgatactgggcacaggtgagattgtgacccagggtatcgcggagtttgcgggggagatatgaccagacatagcgcccgggcgtatcgggcgggtagaatcccgccggaggcttgtacgaagcaaacgggtacggcagtatgccctttccggcggcttcccgcatgtctccttctcctccttgccgggcaaagggagacaggccgagagccaatgtcatgaagagcaggacggacagggcgtaggcatcgtggctgcgggcacggaggaagtctccgtagttacctctaagttccggtgcccggaaccgttccgtgccggcggaacagggatagtcctcgacctgaaaactgtcggcatccacccagcagatggagccatcaggagaaaccagcacattgccgggatgcagatcgcccaggacgacaccgcaacggtgcagagcatggactgattccgacaggttcaggcatagcctggtcagatcgtaacgggtccatgaggggaactgtttcttcagcagttccgcatgaaacgcgaacgccccgagcggaacaccgtccgcccggggcatcagtacgccgacaaagcgcctcagttcgtcgtacaggatctcacgtggccacgccacgcacggggaacgaataggccgggaacatatcagccgaagcttctgctcacgccaacgcatccgttggttcggatagtagagcttggcaacgagtggcgatcctaatgccgaatgggcaacaaagaccaatccttcaccgccttccgcgatgggttttcccagaacgattcgtttcccctcacctgaaaacagaacatccccggccgagtacttcctgctattgccgcagagttcttcatccagccgcctcacctgatggcggagtgcatagaatggagtcatggaaacatgacggcaggtaatgaaaccgtcacatatagatgacgcggagggaataaatttttcaattatgattgataaaaaatggatatggaaacattttatcaatcatattaggacattaatcctatgtcttgattcatgatgctattgatcgtgctcatcaatgaatcaaaaggctccggttcatcaaagagcatggctgaagtctgttcgtagtccctttgccatttttctcgcaattcaagagaatccgggatcagtttcagatctgagggagccaatgtatcgtaatcgacccatgtctgccaatggtagagcttgcgtttgtcccttacatcgaagaatagctccttatcaacatatcccgctcggataagggctaccacatcataatagtggcgtgccagcctggtcttgatacccctctctccatgcggacgggtattattctcatggagaatgaaacacttctcccagaatgttcgggaagggctaattgttcgtacttcagttggatctgaaaactccgggaatccttccccaatgtaagaatcgaccatcctggcttcggatggttccgtctgagctcttccgctcaattcaattttgacaaaaggacgaatgtagaggctttcattctgttcaaacaaggatggataatggattaaaagaacaaatggatcgcgtgccgtggacagattttccaacccgatatgcacattcttgatccccatttctttcatcctctcctccatgatgggtaggagaacattctccatcatcctccggtagtgggggcgaatcttacgtaatttagcatccctctggctggcggattgaaccgctgtcggcttatcttcttcacctagttcagggaagaaatgaggagataacgcaacatcgatatcctcagagaaacggcgtatgatcttgtacgctttggagagggaggtcccgcctctgaagcatagatgaggcttcaatgattcttccttaaaaagaatattcagaacccggcatacccagaaatccttttcaacaatagagggaatgatacccagctgctcgccaatgtgacggcacaggaatattcgatcttcggatgggagactaaggaaatcactcatgagagacagggggcgcgattacctgttgtagaatggggcgcatccatacaggaacaagttccatatcacgagataattgttctttctccgtatcggaaagccgcctggttaattgagagacaacaaaatcacgatctatcgactctctacccagcgaacgcaaggcttgaacaaccaatcccgtaatactacccgacaggcgcatcagcttcggagatgttttcttgaaacggagtttccatccacctacgcgaaccgttgcagaaggtcgatccgttaaatactcgtaccgtccggccatttggtcggaaagccacaaagcattagcggcatagattccattaggcaaaagacgagcttcattttttcttgcccaggctttcgctacctgttccgggtcagttggtacgggcaaattaaatcttttgttggtagcaggtatctcatagattcccggaaggatacgcttgagctcgccatcccttgccatgcgagaaagcgcttgatctactgctgtccggggccagaacgcaagaaaatcggaagaggtaataacctctccttttgccttctcggaaaatattttctttctcagctggctcctgatgctctccttcatgattaaaaagtattgtttatctgactgaagtcaataaaaaatgctgtttatctgactaaatagctgtaacaaagatcaactaaccgcatccgggatgatggacaaataagcctctgcttccttgcgcgagacgccctgcctgtagtgggactccgtcattggcgttccgctgtggcccagccaccgggcgacatcgggtaacggatgaagtgcggcatggtaggacgcgaatgagtgacgcaatgcgtttttggggatattaatgcctgccttggttgcgagttgatccaggcgatagccatatctgagttcgtcatcccgggtcattggctcccattcgcctacggatagccatgccttgatttgcggggaggtgggtatgtaacgatccttcgttttcccctttggtccttttgcgatgtcacgcgaaacaaagatatcgtcatctccatccggcttattcttgtattgaaccacttctgaacgtcttagcccgcacaatccctgtagaacaatacgggaaagcatggggcggtcatatttcaatgccgactcaagcaatttccggaattcgtccggggtaagaatcccgatggatatatggttcttggaaggggcgacggtcaaagagactgggtttttctgaatcagatcgtgctgaatggcccagaggaaaaaggcattcagagtaccccggtatctgtatttgctggtattcgataggggctttccttaataccgaaaggaatccagtttgtcgttgatttcatcagctttgattgatgacaactcacggtttgcccaaccttgttgccatttatcgagctcatgaagtacgttcttgtgatgggacagttgacattgccctctattcagcatcagtgtcctttccttccgatacatatccatggctcctcccagagaaatacctatcggaggcggttccggggctgtcacttcaacactgtcggagatgaggcttaattgcgatccgagtaaatccttgatttcctgctctttggtatccgtgagagcatctttccaccacgaaaggagctccgtcgcaaatttctttacctcttccggatcttcatgctggtacaaatattgaagcgtatgttgcagaaggttgttgttctttccaaatttttctccacaaccgaatagcgaacatttcgatcacggattcactctccgcgaccatattgaatattgtcagcgcgtcgtcgatatgccccttgtcatacatatcgtagagagcccgggcttcgtcgtaatcgcggaaggtgcgctctttccattctcccgtgtccttatcaacaaagcggagccgccagacaggcgggcgtcctgctttctgtacttttgtgagtttaaccttattgccatatcgtcctttggcatgtttcctcttcatgtaacgagagtaatggcttacagaaaaagtttcaagacgaattgggggacaaattgggggacatattcataaaacattactaataaataaaattagttagattcaggttctagtgggggttcccccgtgaaggttcgagtcctttcgggcgcaccaaacaaggccctgcaagttaactgcttgcagggccttactggttttatgatgtattcgtgcattggctttgacgcaacgccggaagattggtgaaggggctggataaggattattgccccgttgttaaagaacgcctgtggttttcaggggagggggcgttgcctttttgggagtggatgcctgcgaattgttcatgcgccagcttcatgaacatgcaggaggaacatttcctttcagcggtaatgcgttgcctgcgctcctggtcgtaaagtttctcgtagcgttcggcgcgtttcatttccctccagaggaagatgcccatcacggctgccacggaggcaccgttttgaacgtattcaagcaggggattgagttctgaagtcgccatgcaaacaaccgcaagggtgttggctaaaacgacacttgtagtaacggcagtctgggtcatggggctggaaaggtcatgtttcgaaacttctgcgcgcttcggaaatgcttccgaattgatggagctgcaaatgcggcggatctgtaaaggatttccatgttcctccccactccaggccgtcaatttttgcgtaaagtttgccaagagtggtgtaaagagggtgattgggcaggtagttgcggtcctggaaaattccaaaatcccaggccaggccgaagttgtgccagctctggccgccgcgggcattcgttactttagggcgttgcctgtagaggtcattctgttcggcatacgtgcgcgttccgcagataatttttgcttcatatccctggttggcggcttcattccgggccagtttgaaccactgccgggcggctttttgcgcttccggaagaagggtggagatgttccgttcggtgcgttcgtcaaagcatccgatctccattttgtaccggtcggcgtccgtgctccagcgttccgttccgttccgcgtgccgttgccgggaatgccgtcaatggctccgtgatagtacccggccaggcgcaagagcctttgccagtagaaggtatctttctgcaggtcggaaatgctgtcagccattgtcgtggttttcctgttcctttttccggtctttggtgacaatgccgatgaggcctgccgccgccatgcctgcggcgataatctggtcggcaagagcttgttcgatagtggctccgcaggctgtggccagggcaaggaggcccagccatgtggaacgttccgtcagtcgattgagaatgtatttgaacatgtgatggtcggttggtattgaaaagtccctctgtgggagaagggggaacccgcctttccggggatgccaaaggatggggaaaaggtttttccgaatcctctccgccaatggggaaagggggctatcggttctccgcacaagttgctctgaggttgctgccgcgatttgcaaagattccgcggatacttttattgcttgccctaatcggcaaaatccgtcacaggaaacgatacttgtcttttattcatgaagataccataatgcgccaaccaacgccattatgaataaccgtttaacatcgtttattatccgcagatttctaccatttctccgatatgaatatctcagggaattggaagcgtacctcagaaaagaggtaaccggttttcctactgtaattcctcctgaacctttttccgaccgccaacagctggaggcataccgcagggctctcgggcaaactattatttccggcatttgttaccggatgtacggccttaaaaaggagacggacaggatttaccgtattttccaccttttgcaaacgtgcagttccggtgaagctactgcggatttgcgggaatacgccgaatcgttgggcgtttccgtcaacagagatttttccaatggaattgaactcgccgttctgcattttctggacggcaatatcagcttgctcaggcagattgaggaattgcattccattaaaaagaggaaatcgtatcgtattcttccccccatgaaagatgcgcttcctttccccatgattacggagaaagaaagggagaaggaaaaagaaggctgccgtcaatatctgtcccgaattttgtcgcagaaggggatgactgacgtatgcgttatcagctgtgaccggatttcctctgattactggtttaccatcaaacgggggcattatcaggaaaccgttgatgaggttgacacgtcggccaaagagatagtcagcagcatacgtactcccgggaatacggacattgtcatctacagggggagttcgaaatgcctgtacatcaatttacaggtcagcgccagaatccaatggatgatgcgggcctatgccgtcattgctggccgcatgctgttcggctcggatatttgggaattaaggaaccgctacaccctgagcgtgtttaataagaagcccatcgccgatattgaggtgttcaataatattccgggtctgcgaagggttgctgtttataagcttgtcatgtccaggcctctccatgcaaggaagaggacggagaaagaggtgttgatgaggggatttacaggcacttacaaaagcctttccgagcttggcgatgaagacggccccctgattgtcgtccccagcgggttccatgtggacaaggcgtttttttattttgagtttgaagaaggagccccgaaaaccgtttctttgactcccgattccaatggcctggaattggaaagcgagcaatacacgctcattgatatgtattttgaacaggctggttttgaccagttgtacaataggattcatggagcttaattacggcaatatcctcaatatcattattgaaagtgagagcctggagtctcccgattggatatggaaggccagggtgggcggggatttttatccggggcactgggtatgcggctgtaaacttgccggaatatccggtgactattacaacccagacgatatcggcaatcctttgaaagtggtggctctgcctccggaagaagagcctttttacgagtacggagggaaccccggggaagaagaccgcaggcgtttttatgtattgaaggaaccctgctgccgggagcctgttgagaggagcgagcttttcgtgcatgccctggtgttcaggaagattgctttgaatattgcccgttcctgcggaaagacggagagggaaatcagcggaacggagctgattccggagtgtctgatcaggctttttgattttcctgtaaccgcctattttgcttttgcttttgatgagcggctggtttccagatgcctgcgcgtcattcggcaggcacagccggaaaagccctttcttctcttggtgatggggaagcgttggcggactgccgccacggaggctgcaattgttgagaagtacaaaggcatcgttgtttccattcccgacgtcatggtgacgacgaaagatggatttgcctgggcatacggctattcctgggagtggctcaggcagggtatgcctgtgcatgcgcgcacgggggaaagccttccaaccggcgccatgtgggaggatctgtggatttccgtgaccgatgagcgggaaatagtcttttcctgttcacggggcggtggagaagtgaaggaattcatgaggttttcctatcgggaggaaaaacgttttttcagcaggcaacgggcggcggcgggccaggattccacgaagccggcttataagatgctgtttttgtacgtaatgaatccggataaagcctgtttggacaaggagcttctggaaagggccgggataggaaatgaggcggaagccaggtcggatttgagaaaagttcttgtggaaaggctgccccagctggcggaaagggacccgtttgccaagaaaagggagaagtcaaggcagggcatgtaccgccggttccaggtagtgccctgtaaatcttatatccgtcctttggaactgatgctttcgcttgaaaggaagccggaaaggcacaggtaggagggcaggcggttatagaccctccccatgagcggctagctggatgagcttattcgtccagctagccgctttcttttggtaaatatatgaatttcaaataataatgatgatatgaaagtggggcgtttttcgctagctggataagtccgcacagggttggcgaatatgcacgaaaagcaatcaccacccttgttggaaaccgtggaaaaccacgccttatatctcgctcagcgcctccgttcaaaagcaaaatccatcggatttcagatacctgaggaagagtatctggatgtccttcaacggttcaggatccgatgttgggaaatttgccgccgttaccggaaaagcggcgccgccggcatgaaaacatacctgggcaatgcgaccgtttttgagccggaacgctatttgcgcgagaggaaccggaagaagaggctgctgctgcgggaagcccgtcctcttgaatatgagaatggccgggaaattgatgctgatgagcattcggaattcctttccgggctgatgttccgggaagaattcgcgcgggaaatggaatccctggagccgctggaaagggcgctggttgaggcattgattgacgctgaagggaatttgtcacgggctgccagaagcattcatctggaagaaagcagagcgcgccgaatcaggaagcgcctccgggaggaaaaattcacttttttaagaaatgggcggcgaatttccggaaacgcggcaagcaatcatagtgaaggcagatgaacgttctttcttttctggcgcatgccctgtccgggacagctccgtgaagagccgtttattcactttatcaagaaccataagcatttgaaaaacaaaatgatgaatacaacaaaaacatgcggggattccagttcccggcctcagcgttcggaaaattccctttcctgtcccgtggcggatgccgcggcaggcccctctcatgaacccctgcttcccgtaggcacggttgccggagatatcaggaacaacgacattgtccttccccgcctgaacattgttcaaagcgtaggcgccctttccgggatatttccccctggcagtatcatcctcaacagggaggttgttctttccgacggaagcgttcctctggagctttccgtgctttccgcacgcaagcagtttattgaaaaactcccctttgattccgtggagaagccggctgtcttcaattctctggaagaagtaagagccgccggcggctcggtcggcagagagccgggaaaccggccttctttcgctcccgttctgcatgtgcaggcgcttttcaaggctccggagggcgtggattatccctttcccctggagtacgaaggagaggctttcgggctggctgcctggtccctgcgcggcatggcttattaccttgcggggcgcgacatcctcacggcttccagatttgccctgaggaatgaagtattcgccggcaagtggaagcttacgaccaggctcaggaggctggaacataatggcattttcattcccgcgctgcgcagtgcgggccgcagtacaccggagttctcctccttcatcaggagcattggttaaatttcttaccctccgcaacgaagagcagcgctcatgagcagtccaatcaggagattattcgtcaacgggttcccgagcctctacggaggagcgggaacggaacttcaccaccagatcattgtctggcgcaagatgggcgtggaagtccatctcatcccgtcctgggattaccacggggagcctctttacaacgaaatggtttccctgggcgtcatcatgcacgcccccgcggactggtcggtcgtccaacccggcgaccccgtgctcggtttctgcaatgccggcttcctcaacgccttgccggaaatacgcaggcatacgaaacgcacagttttcatcaactgcatgacgtggcttttccccagggaaaaggaggccatgcaaaagggggaaatcgccatgttcctctatcagaatgaagccgtccgccaggaagccatgcccgtgctgcgcaagctcaacggcgacccgcaagtgcagttcctgaccttcaggccctatttccatgcggaatcctttccctttatccgggaacgcgatgaggatttcttcggctgcgggcgcatctcccgccaggatgccgacaagttcgcggccaacaccctgcatatctacggcgcattcgtatcccccgtgcagaagcgcggccttttcctcggttttgacaagaggagcgaagccaagataggccggcccttcgactggattcggattgcccgcaatcaaagggaagtttcccagcaggatttttacaggcacagccggatcatcctccagccgacggatacgacggagaactggccccgcatcggctttgaggcgatggccagcggcagcgtgctcattgtggacaaccggggcgggtggcggcagatggtggagcacggcaaaacaggatggctgtgcagcaacgaaagggatttcatctactacgcttccaaaatggcctgtgaaccgaatcttcgcgacgacatggcggaggcggcccgggcgcgcggcctggagctgggcgggctggatgtttccctggagagctggaaggaagtgctggaggcgatggcaagactcccggaatgaacatggaacggaaaaccggccttatgaataaaaaatatgtttccccgtgtttcctgcccggcatgcggctgggcaacatcatgttcacgctggcggccgcctgtgcccacgcccgtaccgtaggggtggagtgccgggtgccctgggcttacaatgacgcttccctgatgctgcgctcccggctcggcggctgggtgctcccttctacgccgtgcggcactaatgaacctccatcctggcaggaaccttccttttcctattgtccggttccctcccgcatccggacgggcgggcttcgcggctacttccagagcgcgcggtattttgaagggcaggaagcgttcatccgggcgcttttcgcgcctctcaccgcggagaaggagcccggcgccgttggcattcacatccggcttggggactacaggcgcctccgtgacaagcaccgcattctggaccctggtttcctgcggagggccgcagggcatttatcatccgggaagaaccgtctggtgctgttcagcgatgagccggacgaggcggcggagatgcttgcgcgcgtgccggcattcggacgctttgcgctggaaatcgaccgcggcgctccgtgcgaatccctccgccgcatgacggcgatggaggaactcgtcatgtcgtgttcttccttttcctggtggggcgcgtggctgggaaatacccggaaggtcatcgttccgcgcgactggtttgtcggcggtgtggaagactaccgggatatttacctgccccattgggtaacactgtaattccgccacgaacccatacccgtaaaacaatgaatacgagaaccgttacaagcctctgggtgggcggggaacttcccctgatgtccgttctgtgcatcaaatcgttcctggaccatggccatgctttccagcttttcacctaccggaattacgacaatattcccgcaggaacgcttgtgcgcgatgcgcgggatattcttccggaggaggcgattttccatgattcccacaatagcctggcgccgttttccgattggttccgcatgaaattcctttcacaggaaggcggcttctgggtggatatggacgtcatctgcctgggtgatgaacttcctgcctctcctctctggttctgcagggagtgggcggaggtggtggccgtaggcgccatggcctttcctcccggtcattccgttcccgcaaccctgtgccgccttgctgaggatccggcgctccgcgtcccctgggactctccggaagaagtccgggccaaggaggaactgctccgccgtgtgccggatgtcgccgatcgccggcgccaggtgccatggggattttgcggccccaccgggatgacgcgcgcgttgcgccactgcggcctgtttgaccgggccgctccgtcttcccacatgtatccggtcccctggacgagatggcgcgactgctacaacggcaacatacgccttgccgggccggaattgtccaatgcctggtgcgtccacctctggggagagatggccaggcgggagccggacgcctgggaaaatatgagccgcagcagcatggcaggcgagctgctggacaggcatctgccgggccacgcctggaagcctgcccccgggccgcgtaaaaaagtgaatatcctggtgggcatctgcagctgcacaggcgcggcgaaccgccgcaaggcgtgccgggagacctggctttcccatcctcaggagggtgtggaatgcagatttttcctggggcggcgcactcctttgcccaatgagcccgatgtagtggccctttgggtggaggacgattacaggcatctgcccgccaaggggcttgccttttatcaatatgccctggaacattatgactttgactggcttttcaagtgcgacgacgatacctggctggcgcttgaccgcctggaaagcctctgcgacggccgctatgaccttgtgggcgacatgtccctggcggacagggggttccccagcggcggagcgggctacctgatgagccgggcgcttgtggagggcattgtggcgcacggcggccgggttcccgccgtcggggcggaggacgtcatcttcggccggctggcgcgggaactgggcgtgcgcgtccatgccacgccgcgcctcttcctcagccatgctccggcgccccaccgcctgaatgaccaggtgagcgcccattggtgttctccgggcaggatgcacggcattgaggcccttttccatgatgagccggtggccgtttatgacgccgtgcatccccattggagggacgaactcctgttttttgcccggggccgtttcatgcgcggcgccggcggctgcaccgggcgctacgtcctgcaggacgggcttctcacgctgttctgggatgactgggcgccggaagctctggaaaaaaacggcagcggattttcccgcggtccgttctccctgacccctgccgccggcagccggcagcttccttttccggagtccgtgtcctgacgggcatggcctccattccctgttcttcccatccgtccgccgtggtgcggcacggggaaggaagatgaaccaatccaatcggcgcctttcgcgccgcaataaaacaacaatcatcacacaatgtttaccaacgatcaacaaaatgacgccccctctttgaacaggggttccgcaaacatgattaactccaaccccgccgccgggcttcccgatgcggccagccagcccggcgcgccgagcgccgcagcgcccctcaatgccatgtccacacccattcagccatacggcgcggattccgttatttatgagaaatccgacaacttcgttcagacgtctgccggagccgatgtcttcatgtctccagtcaacgacacctttaccgtcccggaaggcggggccacggctgtggccagcctgacggtggatgactggggcaagctgaccatttccggcccgggcggcatgtttgagctggacctgacctccgccgccgatgaacccggagaactgggaggccaccaggaatggtccaaatcaggctcctttgagttatccgaaggcacgtacactctctccatcacgcaccagaacatcgacatgccgcacaacgaatacaaccagtccgtgtgcaggtactccgtgacggtgaccgcgcatggggactccagcagcagttcaagcagttcggacacccctccttcctccctctcgagcagctcctcttcggacgtgccgccggaggaaaaggaaatctgctgccgttgcggtacgtgcacggacgcggaaggcaatgaatacaccattgcggcggaaaaactgccgggtgaccccggcgtggaaatctgcatgtcccaggccgaattcctggccaggggaggggcttcggctccgtctcccgcggccttcagcctccgctccgcggaaaacgcccgtgaagcggcggaagcctgcggcggcctgaaatacgtgagcccgtgggcctggcgcgcccatctagacgaaacgtccggcctcatcaccatggtgccgccggcgggcgccgcgctttacttcaacgtgcaggccggttcagatacggccctgcctgcgggcatttcccgcaagcgcgacttcagggtgcagctgctggatgaaactctggctcctgccgcttccggcgcccccgcctacctttccctggtggacgcggacgggcagaaaatccgcttctccgcggaaaccggcgctgtggtcggcatgacctccgcctccggcagggttcttctggcggaagactacttccggaatgtgaacaatacgtatgaccatgagggcagcctggtaagcagctacagcgctgcggaggggctgatgcgcacccggaccggagcggacggagaactcgtcatggaatggtacgctcccgccgccgtcacggtcctggccgacggaacatacgaggtaacgggggaaccttataaaacctcctccttcctgtcctcggaagaaaacggcgtgcggaccaccgtcatcacgcgccagcagcgcggactgccggcccacaccatcacccgtacggaagaacccggcagagtcagcatcgccaaaggccagggggacgacaccatcatccgtaccattgaaaccaaccgcctctacggaggcctctcggaacgcattgaaaccgtcaggggcatcaacgatgccgagcctgtttcctgcagccgcagcgtcaggcaatacacggacggcggctggctgctggtaagcgaaacggaagccttcaacacgccgctggcgcggacgacctcctacgaatacaacagccagtaccgcgtctcccggatcaaccgtccggacggaggctacacgcgctatgaatacgacggcgaaggacgggtcacgcttgaggcggcgccctgggccggcggcggagaacaggtaacccggaccgaatacgccggcctgcgcttctacgacaaccgtccggctcgtgtcgcagaatcccgggtgctgtccgacggcacggaaatcgaactgacggccgccgcgtatgcctatgagcagtctcccctcatggaacgggttgtcaaaaccgtgactgccgccggttccagccaggaacagacaagcgtggaagaaacgtatggagaagccgccgcctatccctatgccgccgggcaaatgaaattcacccgggacattgccggagtggaaacctcctatgattatgaggcggccgcggaacacggcgccgcgcataaaaagacggccatcaccaaagccggcggcggactggtggccggacagagccgcaagacggaatcgttcattgccgccaatggcacggtgctttttgagcaggaaagcatctgggatggtaaaaactggctgctgctctcaagcggcgcccatgaatacgatgaagaaggccgccgcacgaaaaccacgcggggcaacggccgcgtcagcgccacgtcctggatgtgctgcggcaagctctcggaaacggacgaagatggggtcctgacgtcgtacggttacaacagcgcccaccagctggtggaaaccatccgttcggaaatcagcgacggagacacggtcgttaccccggaaaccatcaccacctacacccgggacgccgccgggcgcgccctgcagacgcgccgggacaggggagctatgaccacaacggaaagcgtggaatacgacaggctcggccgtatcgtcaggaaaaccgatgtgctgggccgcgtgacggcgacagcctacagcgaagacggccttacggaaaccgtcacgacgccctccggcgctaccctcgtcacggaatatcactccgacggctccgtactccatgaatacggcacgggacagcgcgaacgctgccatgtctatgacatcgacaataactgtttgagggaaaccgttaccctggccggccaggccatcatcctttcccggaccctggtcaacggcttcggacaaagcgtcgtgcaagtgacgcccacgaccgccgggttcctgtatgaccgttccgaatacgatgaacaggggcgtctcatccgcgcatggagggatgcgggaacgcaggaggaggccgtcgccatggcgcctgcgctctatgaatacgatgccttcggcaacatgaccagggaaacgctcgccctggcggagcagcccgctccggacaacagccccagccgggaatatgccttcagcgtggaaaacgcggaggacggcgtctatatagtgacggtgcaaacccgctacaatgctgagggacagccgcttgtctccgtacggaagcaactgctttccgaactctccggagttctggaaacaaaagcggtcatcatagacgaacgcggcttgacttcggcggaatggacggagtatgctgaaaatacgaaaagaatccaaaagagcgttgtcccctcttccagcgtcacggctcaaacggtgacggcggacggcttcacgctctcgcggaaagaccacgcgggcatcacggagacggtcgcccgcacctatacggctgcgggcatgaccctgacccgcacggacggccgcggcaacacaacggcgatccggaccgacctggccggtcgggccgtcagcgtgacggacgccgccgggaatgcgaccgtgacgcaatacgacgcctgccacgacctggccgccatggtgacggacgcgctgggaaatacgaaatgcgccagatacgacgccagaggtcggaaaacggccgaatgggggaccgggacgcagcccctgctcctgggctatgacgaggccgaccgcctggtgagcctgaccaccttccgcgcggcgcaggaaggagacatcgcggaggacccctccgagcgcgcggacggcgacaccaccacctggagctatgacgaagccacggggctggaaacgcgcaaaacgtatgccgacggaacgcacgtggacaaaacctgggacgccttcaacaggcttgccacggaaacaaacgcccgcggcatcgtgaagacctgcacttacgaacagtcacgtggactgctggtgggaatcagctactcggacgccacgcccggccagagcttcgcctacgaccatttggggaatctgacgcaaatcactgatgccgccggaacgcgaaccttcgcctacaatccctacggagaactggaaaccgacaacctgcgagtgggcaaccacacccacctcatcaccgagaaaaaagacgccttcgggcgcagcacaggctatatctacgcgcggagcggcgcggcgcagcacaccgtaagcattggctatggggaagacggccgcatcgccacggccgggttcctgcagggaagcgcgccccagaccttcacctggcaatacatggaaggaagcggcctgccctccgtgatggccatgcccaacggcatgacgctggaatggggctatgaggaaaagcgggatctggtcgctaccatggtctacaaacgcggtgccacaagagttgtggaaagggaatacgcttacgacagcctggcaaggcccgtcacgcggcgcacggcccgccaggggaataccgtcaacgacagctttgcctgcaacagccggagcgaactgaccgccgccaccgtcagcggcaagacatacggctacagttacgacaacatcggcaaccggaaaaccgcgcgggaagacgcggaagaagcgaccgcctacacaaccggcccgctcaaccaatacaccgccatcgagcgcggagaagaagccgcctttgagccggttcacgacgcggacggcaatcagacattgatcaggacatccaccggaatctggcaagttgcctacaacgcggaaaaccgcccggtgcgcttcgtcaatgaaagcgccaaaaccgtggtggaatgcacctacgactacatgggcaggcggcacacccgcaaagtgagcgtcaacgggacggtgagcagctacctgcgctacatgtaccgtggctacctgcaaatagccgccatagatgccgtcagcggggtcttccgatggttcctgttctgggacccgacgcagcctgaggctacgcgcccgctggccatccgcaaagacggcacctggtacgcctatgggtgggatctgaccaagaacgtcacggaaatcttcgggaaagccggttacctgcggacggtctacacctacacgccttacggagaagccaccgccgaaggggacgtcacccagcccatccagtggagcagcgaatacagcgatgaagaactggggctggtctactacaactaccggcatctcaatccgcacgacggaaggtggatcagccgcgatcctatcgctgaacagggcgactggaatttggttacttacgtgagtaatagcccaatatccttttatgatgaattaggacttcttccttctctagaggggcttctcatggagcatattattccaaaggtaggcaatatttctacatcatttacatggattattcctttattacctccggccgtgacgttagagccttcagtttctattgccggggaatgcacattatgttgtgattcattgacacgtaaacacaaacttcttgtagatgtaactgtttcaggaactgcagatattggaattggcacaagcatcggaaactctggtaaagtatatgaccctaggttgagaggttcccaatttagagataaagaaacaggaagaatatcaaaaaaacctccattaaaaggtcaatctatagaaggaagtttgatgtcaagtgacatcaatgaaaaatgtcctgattatttcttaaacggaagtgtcacgataggtgttcaaggttacgttagcggtggttggggaagatttagcgtaggatatggttttgatgccaattatacgttttcttttcaagaagatcccgctgggggattttcttacggtacggtttatggtcggggtactggagcgagaatttccggatatgttactttggccggcaattttatatttactaccgattaaaaatatctattctattcaaatagtgaatgattttaataaaaaatcttaacatagtttttttattgtgtttgattagataaccataatatggagggtgggaaaacatttaccaccctccatattatgaatgataattgagttttttaatagttttataaagaatgaaatatgatttgacaaataaatagaaatatgaaattataagacatgcgaaataaaaattttgaatttaaaccatatatgagtaaaaaaatattcttttcagctgctataattctttttattattcttaatattagattgattgtacttggttttccttttcccaactctcttgctccgatattgtttttttttctcggatgtttagttatattgaattgtcttaacgagagcaaaaaaggcataatatttccgatggatattcatcggaaagaatcaccccaaatttttcttttaagttttatagcaggattgatcatgggagcaattccaatcgtaataagttttatcatggtattttttttcaatctttcctagtgagatctaattctgtgacgaaggtttaacggaaggagttctagaacaggtagcagagaggtgttctagatttcgttacaggagaatgtcatgcgaatggtttgtgttatataggaattttatgaaatcaaaagcttatataataaggcggaaagtgtaattacccaaaaaaatctggtgaaattactctatcctgtaataataaaaatagccataaatcatcgtattttttattaatataaaattgacatgacacgaagacttggttggatgactacctttcaactcggggaagttactcactttccttttcgttggggtgggtgggattctaatagttgataggttatcatatgaactattgttggagggaaatcttttttcggactatttttattctttctcgcgggtttttattgacaacgttgtatgatattttttgctatatcagacattgatcaggacatccacgggcatctgggaagtcacctacaacgcgggaaaccggcacgtgaaatttgaaagcgaagacggagggacaaccgtggaatgcgcctacgactccatgggcaggagattcgagaaaaaagtgacggttggagggacaacgggcttccacgcgcgctacctctaccgtgactacctgcaggtggcggagtgcgacttgaccggggaaacgccggaggttgtgcgcagttacatctgggacccctcggaacctgaggccacgcgcgtcctgtccatgacgcgctgggaagcgaacgggacgcaggagaaagagcatctctactgcatgcacgacgcgatgaaaaacgttacctccctcttcggggaagcgtgcggacgccgcgccctgtatgaataccggccgtacggaggtctgatcacgtcggaaggcaacatggcggaagagaacaaattccgcttctccagcgaatacatggacgacgaacttgggctggtctactacaactaccggcatctcaatccgcttgacggcaggtggatcagccgtgatcccatcgaggaagaaggcggctggaatttgttcgcgtttgtaggaaataaaatttttaatcaatccgatattttagggttgatatgtacaatagaatatagtataaaattacacacaatattaataaggaaggtagataaagatggtaatatacttcgtttgacgacgagtagagttttttctggaaatggtgatgggaaaaataatccggacaatgttggaaataaagataatggtcctataccaccagggaaatactatgtgataaaaagacaatctggaggaattcggagccaaattgaagattggacctacaaattatggaatgataatgataagactcaatggctcgctttcattgcaatagatgatgcattagacgatcaaaaagaaattaatggagtttttaggtcttcttttcgaatgcattatggaacaagatctttggggtgtatcacttttttagataaagaagtatttgaaaaagcgcgtgaatttatccttgaaactgaatctagaacagtaaaaggagcagatggaacagaatatatatattatggaattttggaagttaaaaaagaatagaaaaagaattgttttttgtattattttttgtagtataataacatttcttatttttacattagcatgtaaaattataggagcagatgtcatggaggcttgtgttcctgttcatataatgaggataattatgaacaatttttatccagaaataattattgatggagagatatcctatagtatccttatgtatgatagttttattttttatgggacaattatttttttaataacatttttatgcatttataaatttatatcaatttttaataaaaattgatataattatatttaaatctctcctgtcttaatggcaggagagatttttataaaaacaagtccgtgggttgctgtgggaatcggctattctgacgccacgcccgtcagagctttacatacaaccatctcggtcaattgacacaggttgaggatgctagaagcgaccgcctacacaaccggcccgctcaaccaatacaccgccatcgagcgcggagaagaagccgcctttgagccggttcacgacgcggacggcaatcagacattgatcaggacatccaccggaatctggcaagttgcctacaacgcggaaaaccgcccggtgcgcttcgtcaatgaaagcgccaaaaccgtggtggaatgcacctacgactacatgggcaggcggcacacccgcaaagtgagcgtcaacgggacggtgagcagctacctgcgctacatgtaccgtggctacctgcaaatagccgccatagatgccgtcagcggggtcttccgatggttcctgttctgggacccgacgcagcctgaggctgcgcgcccgctggccatccgcaaagacggcacctggtacgcctacgggtgggatctgaccaagaatgtcacggaaatcttcgggaaagccggttacctgcggacggtctatacctacacgccttacggagaagccgccgccgaaggggacgtcacccagcccatccagtggagcagcgaatacaacgatgaagaactggggcttgtctactacaactaccggcatctcaatccgcacgacggaaggtggatcagccgcgatcccatcgaggaagaaggcggctggaatttgttcgcgtttgcaggaaattctccgtttcttcgggtagatgcgcttggcctttggaaaaaagaggcaggcagtgaaactatatggtctgcggaaaaaaatgatactttggaatcactcgcagttaatgaaggaagaaataaaggagattacgtatgtatctggcccacagaaggaaccaaggatcatggatatcccaaaaaaattaagccgtgcgataaatacgatgtaagtaatctaaggcttcctgaacaagaaaacagcgtggaattgttggttgcggatgatttatttgatagctataaagacattttccccggtatacgtaaggatatcgaaggaaaaaacgttgcaaaatttctacaaaaaatatctcaagaaggaaagaaacctattacctcttttatacttgccggtcatggaggacgcagctcgaaagatggaaatgcctttactattaattctttgtcaagattagagaaaaagccttcattcagtagagctcaacaaaaaaaggggcctgtccgctgctggttctctgtcgtagcgactgtcatgttttcaggctgcagcagcagtagctttgcaaagcaatttgcaagggaatttatgagaaaaggtactaccgttgctgggactaatcagccgataggaacttttgttcatcctgtaaaagggcctcgaatagtctatggttattctaatgatccaaaaactcaggacctaaaggaaaatgattattattcatcaaaagtgtgggaaacattcaacgggaacttgtaaaatattggcatgatgcagaatgctcttgtaacgctatttttattttctataataactctagacaaatttcatagtaagcattctatttaccaatgagtgggaacaggaaccgaagggatctgtttcaacaagataaaaaaataattccgtaaaatatgatgatatcaaaaaatgttgtttttctatgtagcgcattgctttgctcctgctcggaagatgttgatttgtatcaatccgatttaaataatcattccgttaaaacaaacaggaatggtttatataggtgcccaccggaagagttatgtaaaaaataccctcttaaaaaatattcctggaaagaaaagaaaacaatagccaagtcttttgttattgggacaacaactcaacaagaagtaatagatattttaggagttggtatagtaggaagtgataatcctcccgtcatagatagtttgggttatcgttgtaacaagagcgatccggagtatcctggtgacgaatggttaaaatttcttgaatttaactttaatgaagaggggaagcttgttaattattatgaagtaaaagtaccctatcctgttcctcattaatatttttgttatttataccatgttccttccggcataagccggaaggaacatttgttatatgaggatgagcaaacattcatcctgccttatccaccggaattttctggtgggaatcagctactcggacgccacgcccggccagagcttcgtctacgatcacctcggtcaattgacgcaaatcactgatgctgccggaacgcgaaccttcgcctacaatctctacggagaaccggaaaccgacagccttgcggcaaacggcatcgcctggcaggtctccgagcgctatgacgggttcggccgtcaggcggggtacgaattaagcgcggacggccgccgcgtccagcagacgcacctgtcctatgacgggaaaggccgcctctccaccctcacggcggaaggcatggaaacgcccttctcctggacttactccgaacatggagggcttgtggaacaactcgcctaccccaacggcatgacccgggtcaacacctatgaagacagccgcgacctcctctccgtcatcgactaccagaggcccggaagcgccaacccgccggcaaggcacgaatacgactacgacgcgctgggccgtcctgcacggcgcagggacacgtggaacacggcggcgcccaaaacgacgcgtttgttcacctacaacagccgtggcgaactggtcggagatcagctcaggcccggcggccgcttcggctatcagtacgacaacatcggcaaccggaaggaagccttcgaattcggcagcaccacggactatgaaaccgatgaactcaaccggtatgcgggcatcgtcagaaatggcggggaagcctttacaccccaatacgacgcggacggcaaccagacgctggtaaaaacatccacgggcatctgggaagtcacctacaacgcggaaaaccggcccgtgaaattcgaaagcgaagacggagggacaaccgtggaatgcgcctacgactccatgggcaggagattcgagaaaaaagtgacggttggagggacaacgggcttccacgcgcgctacctctaccgtgactacctgcaggtggcggagtgcgacttgaccggggaaacgccggaggttgtgcgcagttacatctgggacccctcggaacctgaggccacgcgcgtcctgtccatgacgcgctgggaagcgaacgggacgcaggagaaagagcatctctactgcatgcacgacgcgatgaaaaacgttacctccctcttcggggaagcgtgcggacgccgcgccctgtatgaataccggccgtatggcggtctgatcacgtcggaaggcaacatggcagaagagaacaaattccgcttctctagcgaatacatggacgacgaacttgggctggtctactacaactaccggcatctcaatccgcttgacggcaggtggatcagccgcgatcccatcgaggaagaaggcggctggaatttgttcgcgttcgtaaataataatggtatcatcaatattgatttagtaggtttaatagatggaggaatggggggtattattaatgggacatatggatcttctccttttaacgtatcttataaatcaaatcctaattattccccttctaataatggaaagaataatgttggctttccaattaaaggaaatgttagtataaaagtagagaatataattgaaaaaagtaatcctcttgtttttgttgttgcagttgaggttgaaaggactggcgcattaagagtggattatgataaaatagtacagaaattagaattgagtggtttttcaagagaagaagcaagtaaggttcgagattcaattaaacttgaatttagaaagaaacaaactattttaggtaaagctattacagaattaattttaaatcaaaggaaatcaaatggatttgttgacaaaaagtcgaatccatcaaaaactaatccgaaagttactgttgctggaaaaattatgaaacatggaggacgagggataattctgttttctgctggcatagaaatatatacaatatggaatactcctatcgatcaaagggaaagagcgattttgcagtctggtggccgctttggtgggggtattttaggaggggcagcttcgggggcggttttaggttcatatggatttaatgctgttacagtagctataggagcgttccttggtgcagtagcaggatcggaaacaggagaatggataattaataaaatatgtaaatgaaatggacaaaaatttgattaataaaattaaaaataaaaaaatagattatattgttgagtggtgggaggacgatagtctagatattgatagtaatcagcacattcttttttcacttgaaaacgaagatattgatattattgtaacagagaaaaatattgatgaaattaattttattttgaaaaaatttaatgtgaatatatctatggaatttcatgttaacttttttgatcgtattatctatccaatatctagatatggagaaaaatattatgaatataaatatggatgtatgctgaataaaatcttaaaatttataggtattcgctgtttgcaaaaaaggaagtctctttaaatttatatttaatatttttcaattggcattatttttgaaaattaatgatattagttagagctaaatgcacagtgaagaaaatacataggataataatttttcatcttaatgaataacataactaaatagagattctcttgggcacccggtaagctacacttgccgggtgtctcttatcggatttttatctttattacaaagtgtatatatacgaaatatactgtaatctgctgacgggaatcggctattatgtcgccacgcccgattagagttttacatacaactatctcggtaattgacacaggttgagtatgcaagaaacaactgcctacacaaccggcccgttcaaccaatacaccgccatcgagcgcggagaagaagctgcctttgaaccggttcacgacgcggacggcaatcagacattgatcaggacatccaccggcatctggcaagtcgcctacgacgcggaaaaccgcccggtgcgcttcgtcaatgaaagcgccagaaccgtggtggaatgcacctacgactacatgggcaggcggcacacccgcaaagtgagcgtcaacgggacggtgagcagctacctgcgctacatgtaccgtggttacctgcaaatagccgccatagatgccgtcagcggagtcttccgatggttcctgttctgggacccgacgcagcctgaggctacgcgcccgctggccatccgcaaagacggcacctggtacgcctacgggtgggatctgaccaggaacgtcacggaaatcttcgggaaagccggttacctgcgtacagtctatacctacacgccttacggagaagccaccgccgaaggggacgtcacccagcccatccagtggagcagcgaatacaacgatgaagaactggggttggtctactacaactaccggcatctcaatccgcacgacggaaggtggatcagccgcgatcccatcaaggaacagggaagctggaatttgttcgcatatgttaaaaattaccctatctttttaaaagattatgttgggctaatttcatggggggcaaaaaaaatagctcctgatccgcatcctgatcttcctaagtatagtattgatttttggaggatagggaatatgactcttgggtatccggaactctatactgctttaataggaacaagggttgattcttctttggcgtatgaaatgttcattaaatatctttcaaagacaggtggcgagtataaaatagatcctcaatatattatagatctcgagagtggcgaatcagatggtctccaagataatattaatttattggcaagattggctatatcgtatgcgatagaacataaatgttttgagaaaaaattatatctggattcctggtaacttcttcaaacaagatccagtgaaggaaattatattttaggaagatattacatgacgatgactgctacagtaaattcagattgttccgtagattatactgcatatattagcgatatttatgatttcgatcataatagttggctgcaaacgcgttttgccgccttagaaaaatacggttatgctgctccttttaacgtgagaggaaatatttctggaacatatagaaagtataaagaatgatgaaagaaatatttattgttttgactttattgacaaattttatttggttcacattttatcttgtgtacatcgggaaattcccgttggtaaaaatacttgtatgttctttaattgattttattgtcataatattatggaacgggggtgaatattttttgcagcatatcatatatgtgattttttgttcaatccttctcggaagtggatttgcaggatttattgagtacataaagaatttatataaaaattacaggaaaggtaatttatcatttaagtcaatttttgttattttattatacgtgtggctatgcgctatctatattgggatggctcaaaattaattttataaataaaagaatggttttttttgatgttgtataatattcgttcaagtctcttcttttattgtttgtgttttaataaaattttaatgaattgataaaacaaataattaaattcaaacctctcctgtcctagtggtgggagaggtttttattttttgaaataaacatagtaaacttcggctacagggaaggcggccgcattgccacggccgggttcctgcaggggagcgcgccccagacattcacctagcaatacatggatagaaactttcgttcattctgtaaaaaggctttgaaagtctatggttattctaatgccccaaaaactcaggacataaaggaagatgattattattcatcaaaagtgtgggaaacattcaacgggaacttgtaaaatattggaatgatgcagaatactattgcgacactatttttattttctataataactctagacaaatttcataataagcattctatttgccaatgaatgggaacaggaaccgaagggatctgtttcaacaagataaaaaaataattccgtaaaatatgatgatatcaaaaaatgttgtttttctatgcagcgcattgctttgctcctgctcggaagatgttgatttgtatcaatccgatttaaataatcattccgttaaaacaaacaggaatggtttgtatagatgcccaccggaagagttatgtaaaaaatatcctcttaaaaaatattcctggaaagaaaagaaaacaatagccaagtcttttgttattgggacaacaactcaacaagaagtaatagatattttaggagttgggatagtaggaagaaataatcctcccgtcatagataggttgggttatcgttgtgacaagagcgatccggagtatcctggtgacgaatggttaaaatttcttgaatttaactttaatgaagaagggaaacttgttaattattatgaagtaaaagtaccctatcctgttcctcattaatatttttgtatttataccatgttccttccggcataagccggaaggaacatttgctattattttaactattgatattcagtaaattgctccgataaaaaatcgggaagatcaacggaataagattaaagtaaataattccgtgaaaatattatatagaactttttttgctttttatatttttttaataacagggtgcagttctgaacaagaatcatgggatatctgtaaattaaatgaacatcttggaattgatttgccgtccagtagtatagttctttatgcaagcgatggaggaggaaagatgagagatataagttacgaacattattcttggactttatattctcctgtttcagtcaagatgccggtagaaatgaaagcgagatttcctctggaagatgaaataaaatatattgaatctacaatgcataagataaaaatgaaaatatcgcaagctcagtatgctttttttagcgattggagaaaaaataactatatttttcgtgctaatgttgtaagaactttacacggagactttcttgttatttcacgttttcgtgaaaaataattaatcaaactctaatacagaaaatagtcgtgtctttttagatatttattttagtacctgtcttcgttccaatttactgctctacaatgctagaggggacagccgcttgtctccgtacggaagcagctcttgtccgaactctccggagttctggaaacaaaagcggtcatcgttgacgaacgcggcttgacttcggcggaatgaacggagtatgctgaaaatacgggaagagtccaaaagaacgacttcttatgttcaagcgtcacggcgatagtcctggagcttgcacggccacggggatgattcagatctgatggacttgccatggggccatgaggttggaacgcgaaaaatgtatgacgacggtagccagaaactagtgaaaacttctatcgatatcaggaagtctcgacaatgccgaataaagttgctgtagcaatgcttacagcaagagacctaatatcaagatatgaaccaaagttagtaaattgcctcctctgaatccaagtaccgtttctgttacacctaatgcgtttaagatagatgaagaatgcggaaaaagggagaataaataatcaataacatgaaatttttgttaatttttattatatctgctgcttctatatctaattctaatatcaaagataaaacattgatattgaaggagattatggaattaccgccaaatcttttctatgaagaaaatagagaatcatttcaaaaaaggattgagcaaggtaaattttgggtagatcaggaagaaaaaatatcatatctattcataaacggagatggtgaatttggaaaaagattattcatattagatgaaaaattaaatttatatgtaattcatctaagtaatgatgaagaaggaggtaaggattacatgttgtataaatatgaccgtctaaagaaaacagcgtttttaattggtacatttaaacaggatttatttgaaaaataaatatattgatacgcagtttttttgctaatatgatttaataaatttaaataggcctgcaattaaataattgcaggcctatttgtgtttggatgccagattacattgggatgcaatataatggagggaaaattgtcacaacgaatataataatcatatgaaattatgtatagtatctttagtgttattttttagtacgtcaaattgtcaatataatcttaaaacggttgtagaacctaataaaaatcatgatagtgccattgttgatgatgttcaaatattggaaaaatcatctagtggttcaatatggaaaaaattttatgttaaaattcatggtttagaaaaatatattccaggagaatatatagattctccatatattattgaatacaaaaatagatttattatagtatgttctattaaaagagaatcgattgtttttgttgttacaagaaagaataatcaattggaatttattcctgtaactgaaaaaaataattatgaattgttcatggataaatgtcgaaacatgaaatattatcctattcgttttgtaaatggaacattgcctaagttgagaaatggacagttagtatctgattattcgatagagtgttcttctaaagaatttcccgatccatctgatattatttatttagaatttaaaggaatatttgattttgatttcaaagaaaatatattggaattaaaaaatatagaaggacctataaattaattttttcctatgttcagtaataatttgaattatcattgtaaaaaggatgattaaaatattttgacaatgaatggatgttttttatagagtaaaaaatccttacaatactccttcctattgtatgccatatgagcgcgagcaaacattcatcctgtcctatcctctggaatttactgacgagaatcagatactctgacaccacgcccggtcagtgctttgtatgcaaccatttttaggaaatctgacacaaatcactcatgtctccggaacgggaatcttcgcctaatccctacggagaattggaaagccaacgctttacggcaaacggcattgcctgcaggtctattcgagcgttatgacgaactcagccgtccggatgggttccaaattaagcgcagacgaccgccgcgtccagcagacgcatctgtcctatgacggggaagcccgcctctccaccctcacggaagaaggcatgaaaaaccttcttctggatctacctcgaaagagaggaagagaacaggttccacttcttgatcaaaaacgtagacgatgaactgggactggtctactacaactaccgacatttcaatccgcttgacggaaagtgaagcatttactacttatggagtccccatactgacatttctattaccagtgaagacatccgacaaggtatctttcaacgaggaagttttatgcaatatgcagtaataattaattgtggctgtaatgaggaaattttgctaaaagataaaaatacccccctatttgtgagagtatggggaaatttttaggagtgctatatatgacgtcaaagataaaactgattatatggtttctaaataatagttttttaaattttcagatttaatttcaaaaaattctgttataatgcaatgaaaagaataataaaaataaaagagaaaaatatagataaggaatctgcgattataacgataaagatcatagtttttccaattgtttcatttgtgataattatatttggtattttttttcttgtcggaaagttaaataatttttattctttgccagaaaattatcgaggaaatacattagaacatcatcatgaacagcttgcccgggaaggtttttcgtatcttggaaaaacggaaactcagggagtttctaaatatttagctaaagatatatatatatatagaaaaaaagtattattgggtttttatcattatatcatgttatctaaaaagaaaaatggattaaagatagattctggaggtcagtatttatctactcctttcaataaattaattttttcatactataaaaattttgttcctaaagaacgccccccgatagtcaatcgaaaagatatacagtagcggctctgcaagaattttttttgttagttgaatatatgagtttttaaaatcagtgcatagaatttagatagtctgaatactaagagtgaaagtaatttgcaattactttcactctttctatttattagaaagaaaatatggtaaatgattttaactatataggtctcaaatactattataacctttataacttgactgtatttacaatcaaggtagtatttaggaaacaaacaacaagtaataatactaatatctaaaacaggaagtatcattagatcatgcaagtgataagatttttatcatggataatggttgtttgttgatattatgaatattaaaatatgatagtctaattaaaaaatataaaaaatgaagccattaattttaacaatatcagggtatcttctgattataatatttataattttcgcgttgttgttgtctatatctttagattcaagtttatggtatgattggatagcacgaatgatactgatcttatcggtaattttaaacattttatgtttttttatgagtatttcacttatattaaagagacataaaattttgatgaatattttagctcttattctttctatcaatttcatagttatatcatatccggtaattcttgaagaaatttcaattatcactaactaatttttgcgtattataacaatcagagattaaaaaaattgattgactagtaagtgatgtccggagagacagcgaacttccacgcgcgctacctctaccgtgactacctgcaggtggcggagtgcgacttgaccggggaaacgccggtattcgtgcgcagttacatctgggacccctcggaacctgaggcgacgcgcgtcctgtccatgacgcgctgggaagcgaacgggacgcaggagaaagagcatctctactgcatgcacgacgcgatgaaaaacgtcacctccctcttcggggaagcgcgcggacgccgcgcgctgtatgaataccggccgtacggaggtctgatcacgtcggaaggcaacatggcggaagagaacaaattccgcttctccagcgaatacatggatggcgaactggggctggtttatcacagtgctcatcggaatcaattcgtttgatatctttggaacagcctcattcctgttggaaatcggccaacggggattggaaagagataggattcatgcagagtgagttctgcaaattttgttgaggaagtcttttggaattctgtatgggattcaagctgcatccggtatgttcctggtgcagtttttgtgtaaacgggttgagaaagacttgccgttatccgccttccgggaagaacggaaagcgggagcgcagccggaagaattaattttttcttaacaagaagaagaaggaagttaactacccagaatggaatttccggatatattgaggcaatgtttttacattatattaaacatcgccggtctgttccgggacttcgtatctgccatagcggtttttccgtgaaattttttcagataaaaaagaaaaacggcatagaataatatttttgtttccatatatgttggaatggtttgaatttaaatttcataaaatatcatgatggaatcattgttgggttttatcttttgtctattgagcggaatattctgtttttggctctttttcaaatgcgtcgactggtttgaaaaaatctaaaactgtgcctgtctatgtatacattattatttgtgattagcttaattgtgttcggttatttgatgtatgtcttgatcaaaccggaaaaattttaaccagcaagatgatgaaaacagaaattctaggtgttattgcgcaaatcgttcttatggtggctttgagctatcctctggggaaatatattgccaaggtttacaagaaggagaaaacatggcttgatttcatgaagcctgttgaaaggctgatgttccgcctgtccgggattaatccggaggaagaaatgaactggaagcagttcctgcgggctttattgaccgtaaatctgttctggttcgtatgggggatggttcttctggtcagccaggggtatctgcccctcaatccggacggcaacgtcggacagacgtgccaccaggcgttcaatacatgcatttcattcatggtgaattgcaacctccagcattacagcggggagagcggtttgacctattttacgcagttgttcgtaattatgctgttccaatttattacggcagctaccggcatggccgcaatggcagggatcatgaacgctctcagtaagaagacaactaaaacgattggaaacttctgggattacctcgtgttgagttctacccgtattttgctgcctctttctctggtggtcggattcatcctgattactcagggtacgccgatggggtttgacggtaaaatggaagtgacaacccttgagggagtggaacaaaccatttcccaagggcctgccgcggctgttgtgcccattaaacagctgggaacgaatggcggcggttatttcggcgttaattcatcccatccgctggaaaatccgacttacctttccaacatggtcgaatgctggtccatcctgattattccgatggcgatggttctggcctttggtttttatctcaagcgcaagaaactgggatacagtatttacggcgtgatgttgcttgcctttttaattggcgtttgcattaacgtgtatcaggagatgaacggcaatccccgcatagaagagatgggcatcgtccaggaaagcggggccatggaaggaaaggaaatccggctcggatccgcggctacagctctgtggagcgtcgttacgacagttacgtcaaatgggtccgtcaacgggatgcatgattccaccatgcctctttcaggcatgattcagatgttgaacatgcagattaatacgtggtttggcggcgttggggtagggtggatgaattatttcgccttcatgattatagccgtgttcatcagcggtctgatggtgggaagaacccccgaattcctgtgcaagaaagtagaagcccgtgaaatgaaaatcgcttccattgtggcgttgctccacccgtttgtgattctcgtcggaacggctctggcttgttatctgtttgtttacgcgccgtcgtttgtggaaggcgaaggagggtgggtcaataatcccggctttcatggattgagtgaattcctttacgagtatacttcaagcgccgccaataacggttccgggtttgaagggctggccgataatacctggttctggaattactcatgcggcattgtcctcattctgagccgtttcatcccgatcatcggccaggttgccatcgccgggcttctggcgggcaagaagtatattcccgagacgtccggaacgttgaagacggattccgtaacgttcagcgccatgacttttgccgtgattttcattgttgcggctttgtccttcttccctgtccatgccttaagcaccattgccgaacatctgagtttgtaaatttagggtagaatacgtttaccaccaataatatatttacatatttccgttccagtttctggaattgaaaaagaaatctacgatatgaaaaaattcaataatacttccctgttccaaagggaacaggtacgggaaagcttgaagcagtcattgatcaagcttcatccgggaatgatgatgaggaacccgatcatgtttaccgtggaaatcgccacgatgatcatgcttctggtaaccgtttattccctcttcagcgacggacaaggggatttcctttataatttcctcgttttcgtcattttgttcctcacccttctgttcgccaattttgccgaagcgattgcggaggcccggggaaaggcgcaggccgacagcctgcgcaggacgcgtgaggaaacgccggccaagttgattgtcgatggcacggttaccgtcatcaatagttcccagttgaaaaaaggggattatttcgaatgtgtcgcgggagatatcattcccgccgacggggaggttgtcgaagggctggcttccattgacgaaagcgctattacgggggaatccgctccggttatccgtgagtccggcggggataagagttccgtgacgggcggcaccaaagttctgtcagaccgtatcaaggtgcttgtcaccgcgcgtcccggagagagtttccttgataagatgattgctctggttgaaggcgcttcccggcagaaaacccctaacgagatagcgttaaccattttgttggctgtctttaccctggttttccttgtcgtctgcattaccttaaagccggcagccgattattccggaacggaaatcagcattgccgccctgatttccctgttcgtatgtctcattcctacgactatcggcggattgctttctgcgatcggcattgccggaatgaatcgtgccttgagggccaatgttattacgaagtcagggaaggctgtggagacggccggggacatcagcaccctcctgcttgataaaacgggtacgattacgattggcaatcggaaagcgacgggatttttccctgtccagggttttgacaagcaggcttttgttgaagcctgtctgatgtcttccgtttcagacgatactccggaagggaaatcgattatcgagcttggacatgaatacggcgtccatatgcgcaaccttcatacggagggggcccgcatgattcagttcacggcggagacgaagtgttcgggcattaatctgagcgatggaaccgaaatccggaaaggggcttttgacaccatccgcaagattgccgaggaagcgggaaatccatttcccaaagaagccgaggaaatcattgaaagagtggcgggcaatggcggcacccctcttgtcgtctgcatcaacaggaaggttgtcggcgttattgagttgcaggatatcatcaagccgggcatagaagagcgcttcgaacgcctgcgcaagatgggagtaaagacggtaatggtgacgggggataatccgagtacggccaggtatatcgctgaaaaagcaggcgttgatgatttcatcgcggaagccaagcccgaagataagttgagttatatcaggaaggagcaggcttccggcaaactggttgccatgatgggggacgggacgaatgacgctccggctctggcgcaggccgatgtcggcgtagccatgaacagcggaacccaggccgccaaggaggccggcaatatggttgaccttgataatgaccccaccaaattgattgaggttgtagaaataggcaagcagctgctgatgacgcgcggcacgttgacgacgttttccattgccaatgacgtcgccaagtacttcgcgattgtgcctgcgctgttcatgattgcgattccagaacttgctgcgctgaatatcatgcatctgcatagtccggaaagtgccatcctgtctgcgattattttcaatgcaatcattatccccatcctgattcctctggccttgaggggcgtggcgtacaagcccattggagccagcgctctgctgcttcgcaacatcctgatttacggagtgggcggtctgattgctcccttcatcggaatcaaactgattgatatggctgtcggcctgtttttttaactgaaataaatatattgttatgagaaatttagtgaaatcattgcgtcttacacttgtcttttgcgtttttttctccatatgctacatcctggtgctgtggatattcggattgattgccggccctggcggaggaaatgcggaaaccctggttttgaacgggcgcgtggtaggcgccgccaatgtcgggcagcaattcacgaaggatatttatttctggggccgtccgtcccatgcgggcgacggttatgacgcgtccagttcatccggcagcaataaggggccgaccaacgaagaatacctggccgacgtgaatattcggatagattcgttcttgaagaaacatccttatttggaacggaaggatgtcccttccgaaatggttacggccagcgcttccggcctggatccgcatatcactccggagagcgcctatgtgcaggtgaagcgcgttgccaaggcccgcggcatggaggagggggcggtgaagtctcttgtcgatcaggccgtggaaaaaccgctgctgggcatgtttggcacggagaaggtcaatgtgcttaagttgaatattgctcttgagaaggctgatccttcagggaagcattaatttcctgattgtttagggcggcaatggcaattccggatttggtgataaattgccgccttgaaaaaatgaaatcaattgcgggcttcatgtcatggtaacgcccgcaattgattttcattttcaaaagattctgtaaaatcaacaagatgtttttaaccgcaggagccgggtgaatttaatatgattgacggaagtaacggagcagagcactttcttgacctgatacggcgttctcgaaggggaaagttcaagatttacattggtatgatggccggagtaggcaagacgtaccgcatgctgcaggaagcccatgaattgctgaataacggcattgatgtcagaatcggttacgttgaaacccacgggcggcccgggactgaagccatgctccggggggtgcccgtcatcccgcgtaaagtggttttttacaaaggcagggagattgaagaaatggacctggacgcgattcttcaagcccggcccgagttggttattgttgacgaactggctcataccaatgtggaagggagccgccatcgcaagagatgggaagacgtgatggagctgcttgacgccaatattaatgtgatttccgcgattaatatccagcacatcgaaagcctgagcggcgaagtgaaggagattacggggattgagatgaaggaacgggttcccgacaggattttgcaggaggcggacgaagtggtgaatatcgacctgacgtccgaggaattgatcggccgcctcaaggccggcaagatttaccggcctgaaaaaatccagattgccctggataattttttcagaacggaaaatattcttcagctgcgtgaactggcattgaaggaagttgctttccgagtggagaaaaaagtggaaacggaagtattcccggcagtttcttccgccagaagggaaaagattctggcctgcatcagcagcaatgaacagacgccccggcgcatcatccgaaaagcataccggatttcctcgcgttacagtacgtcgtttatcgccctttacgtccagacgccaagggagtcccccgaccgcatcaatctggcatcccagcgccatttgcttaatcatttcaagctggtggccgaactgggagggacggtgaagcaggtgagtgcggaagacataccccaggcgatcatcgcaacgtgcagggaatatcatattacggctatttgcatggggcatcccgcattcaaaatgcccggagccatgttcaagatactgggatataaacaatttctgcgtgtcttgtcggagatgaagatagatttaatcatcattgcataaaaaacagaggtaaatttgaaaataaggccggagccggttcttttcacaggaagcaggcgatgagattatcatgcttgtcttccctgagcggaacggattgttgccggcagtttccattatagcctccccgggggcgttttccgttaccattcccgggcggggcggccccttttatttttttccgtctggttgtctgaaaaacagtccaatgttccggtccgccgcatctccggcagcacctttgttgaaaaagaatgtagaattcccggaggagcagcattcttaaaagtgaaacgataacgttccgtcttccatagaggagcggcggttatcataaacagaaggaacagttatgagcatcaatttgcaaaaagtcattatcgccgtatgtgcggccgcaacggtcagtgcgggattcgcagcccgcaccgagggggccaaactgcaccgattcagcactactatcgaaaaagagaggccgcagttgaatgaagaaacgaaacggttgattgcttcctatcgccgggacccgtccgaggctaatcggtcggctttgaggaaacaggtcgggattaattacgacaaggtccttgaccgaaaaaaggcgaagcttgaagaattgaaacgaacggcccggcatgcgtccaagatacaggaaatgcaggagatcgtggatgaaatggttcaaaacagggaagcgcgcatcgaccaaagcatgcggcgtttcagtgatccgcgattcagaccaggtgcccgctatgcagatggcgggtatttgccggtgctcggagcttcctggaatgtatcaattgcatatactccggttaccaatgaggattatgcccaattcctgaaggcaacgggaaggaaggctcctaaggattgggataatggcgccatgcctgccggcaaagggaggcatcccgtggtgaatgtttcctatgacgacgcttctgcctattgccaatggttgtcgctccaggatgggaaagccgtttaccgcctgccgactgaagaggagtgggagtttgccgccgggcatatgcccaaggatgcggattttaattgcggcgagagaaacgggacatctcccgtggacgcccatgccgcgacatccggcgcctgcggagcgattgatatgtggggcaattgctgggaatggacttcttcttcagttgaagtttccaaggccgtggcacacggtaaaacggtcatggcggtgaagggcggttcttggcgttcgccgcggacgagctgcaggactgagcggaaaggagaaggaagggaatcttctttcgctttcagtgatgtcggtttccgggtcgtccgcgaaggttgagggggattccatgcgtttcagtttcttacaggcaatagaatctggctggcagacctgatggaaattccggccgaattggtagatttccctaaggaactgcattcttgaaaagtgaaacgataccgtttcagaaaaaatatcaaccctcattgattatcatgaacaagctcattattcctgcaattattggaatattcggtctggctcccggtacggttactgccaacgcggcggaatcaacaacagcctccttttctgttcaaatactgaaaaagaaaccgaaggcgttgaagtacggcctgaaacacggcctcaagaaaggtttgaaacacggtctgaaaaaaggcaggataaacggcggtaaaaaatagtcgccgccatcttatctgctgccgggcctgcagcccggcagcgttttcccatcaataaggacgttttatcacctgtagtgcggaaacatatctgacttccgtacagctttgatacattgcccatcatgtcttaaaaagtcaacatattgagaagaaaggcgttttatggtaaaatggttgttgtgcggagccgccatgatttccggcatcgtgatcgcggctgagccggaaaatcgttcattccagtttggaaattttgaggtgattgctgttcaggatgctctttcagcgatgcggttcgaattattcccgggtatgccggaagaggagttcctccgcttaaccggaggcgggagggttccttcttccgtgaatgttttcctgttgaaacgcggcgacggaaaaatcattctggtggacgcagggaacggaggaaaacggggcgggatgctccgtaaacttgaacagagcggcgtttttccggagaacgtcgatttcattttactcacccatatgcacggcgaccacatcggaggattgcttgggaaacatggcgaagccgttttttccagagccctcgtctatgtttccatgccggaatgggaattttggcaaaatggtacggccggactacagggaaaacaggttcggaaggtgttgcatgcttacggcagccgggtgagaacattccggtttggagaagaagttctgcccggcatcaaggctcttgacgcttccgggcatacacccgggcataccgtttttgagactgattccctgctgattgtcggagatttgcttcatgctgccgcgctccagattccgcgtccggaggtttgcacgatttacgatatgaatccgttcggagcggttcaggcccggcggcgcttttatgagtttgcggcttcttcctcgaagccggtcgccggaatgcacctgccgtatcccggaatcggccggataggaaggagtgcggcgggatatgtctatctgcccggaaaatgagaaaggataaaaaagacacggtacaatgacgcaagcagaaacagcatgcccggatgcctggggaagccatttccttgaataccggggaaggcttcttgccctggcccggaggaatttgaatccggttcttgcccggcgcgtttcggcggaagatgtggttcaggaggctctgctggcagcctgcgggaaaatggctttttttgaaaacaatccggagattcctgtctatttcaaactgcggacgattctgttccagacccttacggctatggaaaggaagcatctgcaatgcctcaagagagacgcctgcagggaagtgaatgtgacggatgacggcgtggggcccgctgcccggttggattggaaccggtttgcagataccgtgaccgggcctcttacccgtgccgtcagggcggatcgttatacattgctccggaaagcggtcgaggcgctgcccgaaaacgatcggcagattcttgaactccgccattttgacgacatgtccaatgcggattgtgccgaagtcctgcatattgggccgaaagccgcaagcatccgctatgtgcgggcgctgcagcggcttcggaagcagctgatggagttaaccgagtttcagccatgaaggggaagatttctctggaagatctggttgaacaattcctggatcagtgccgttccggcaatgttcccgatattcaggattttgccggggcgcatccggagtttgctgccgagttgctggctcttcttccgcttgtgatggagatggaagattggagcgttgaaaaaaaacagggaattatgcctccggttcacgattttcccgatttggagggggacgattaccggctgattcggagactaggcagcggcggtatgggggtggtatttgaagcgctgcaattgtccctcaaccggaaagtggccctcaagctgttgtctccgttgctgctgcaggatgccgcccaacgcagcctgtttgagcatgaggcgcatgtgattgccaggcttcatcatcccaatattgtcagaattttcagtgccgcgtgccgtccgggatgttgttattatgcgatggagttgatagaaggcaagagtctggacggatgtgaattcagtaatccgtatgagatagcccgcattggcctccaggccgccagggcgattgcgtacgcccaccgctgcggcattctgcaccgcgatatcaaaccggcgaacctgttgctggatgaagcgggggaagtacacgtcagcgattttggacttgcttttctgcttcaggggagaaatgaagttattgagaaggaaggagctcagagcggaacactgcggtatatgtccccggagcggctggtgcatggagtcaataccttttccagcgatcagtatgcgtttggggtgacgctttatgagcttgttgcaaaatccccgccgtttccggggctagctcctgaagaattgatggaacggatttgcagggaaccggttccgccgttgaagtgcagcgaacccgacttggccgcgattattaacaagtgcgtcagtttccgcccggagtcgcgctatcgaagcatggacgaactttctgaagatttgctgcattttttgaatcatgaaccggtcggggcctcctccccgtctccggccaggcggttgcagctgtggatgaaacgtaaaccggctgttgccgtattgtctttggctgcggccctgtgtgcggccgctttcgttgtcgcgttgggcgccggttatctgcagacggcgtctgcgctgaaactggcggaaaacaatgccgcagttgccgatgcggctttgtcacaagtgttcacccgtattgcggagcagcccccttcacagaaaaatacgcagctgctttcagctttgctgccctattacaggatgatcgccagaggaaaaaatctgccggagtcaaaggtttgcgaggccaatgccgtcatcggggaatgcgcactgcgcaccgggagttatgctcttgcggaagaagcgttccgcaacatgatgaaattcaggaaagacgcttttcccgtcaaccagttggcgacggctttgaaaaaacagggtaaagataaagaggcaacggaacttttccggcaggtggccgaccgctttgcgatgtcggagcgggcggaggatcggtttgaaacggtccgcgcgttgctggctttgtccggttctccggagagtgttgagcgttcccgggcgttcggaatgttggaaacattgttggaggatgatcctgaccatcctgaataccgttttcaatacgcacagcttttggccggaaatccccgccttttccgggagaagcgcattcccggcattgaaccgaatgcagccgtgctgctcctccagcttgccgacgcccatccggaacggccggaatacggcctggcgctggtagagctgatgctgaagaaactccggtatgccaggaatttccgggaacataaccagagggaacttgccgatacggtgaatctttccgaaaggcttctcgggcgttggccgaatgatccgcaggttatttccggcatggtccggctgcatgcacggtatattggggccctgcgacgcgaaggaaaaaatgcctgggcccgaagggaaagcgaccgcctgcagggcatcctggaagttcttttttacaatcccgagatttccgatgccgtgaaagaaagcctgatccgcctccagcttcaacgtttgaaactgttacggcatgacggccggagttatgaaggagaggatctgcggaaaaaaatcagccgggagctgggcttttaccacggaccgatgctccgggtgttccgggaggagttggataaagccgggccggatgatgaatcctccgtcgggaaaagtgaagattccattatttttgaacgcaccaagcaaggtttgtaaattgtccgcttaccggcactcagcaatttgttgtgcgagggggaaaggaaagcgtcccgttccgagcggcgctggtgcagaagaaggcgggtatttgcctccgttgcaggcggagtgtcagatgcgttcctgatgcatttttgttttccgagccagctttttgttccaaggcgcttcctgagataaattgctgtattcccttgttgacttccagttggtggaacccatatgctcggattatatatcaaaatttcaaccattaacgtttaatgagcatgtataaacactattctgacggccgccgccgctttctcaaaatgtccgccttattcggtacggcagcgctgatttctccggccattgcccgggcagagggcgggggtgccgattctccggaaaacggcggctttgccgcctcccggagccggacgcttggcaagggctcctgtgctttggaagcttctccccttggcttcggagtcatgggaatgacctacaaccgcagccagtctccctcgcgtgagcagtgcatccggcttcttcatgaggccgtggagcgcggagttactctttttgatacggccatcatctacggccccctgagcaatgaacttctggccggggaagctctttccccattcagggggaagatcagcgtcactaccaagttcgggcacgaagttattaacggaaaggggacgggccgccaggacagccgcccggaaaccatccggcgctactgcgacgagtcgctgcgccgtttgaaggtggacgctattgaattattctaccagcaccgctttgatcccagggtgcccgttgaagatgtagcgggaaccatctccgaactggtcaaggaaggcaaggtgcggcgctggggcatgtgcgaagtcactcccggtacaattcgcagggcccacgccgtccatcccctgacagccattcagagtgagtaccatctcatgcaccgggatgttgaaaacaatggcgttctggatgtctgccgtgaactgggtataggctttgtcccctacagcccgctcaacaggggattcctggggggctgcatcaatgaatacacgcaatttgacccgaacaacgacaaccgccagaccctgccgcgtttcacgccggaggccatgagagccaatatgcgtattgtcaatattctgcaacagtttgggaggacgcgcggcatgacttcctcccaggttgccctgggatggctgctgcaaaaggctccttatatcgtacccattcccggcacaactaaactgtcccatctggaagaaaacctgcacacgcttgattttacctgctctccgcaggagtgggcggaactggagaacgccgtggcctccatacccgtgaccggagcacgctacaacgcggaacagcaaaggcaagtagggcattgacccgatttgtttgccgggatcaacggcaatcgcaacggcggcctccgcagaacgttcgtcaggcgttccatactatccggaattccttgttgattccgtttttacggattgtctgaaaaacatttccttctgaaagcattctgccggaagaaggggatgtgttgttgcgtgaagcgagtagcctccatttgcccctcccggcagcaggcccaggcgtcagcaccttcttcaaattttttgtttcaggaaggaatccatccattccgggttcacctgtggcagaggttcgcctttgtcatatgcctcgcagcactggccgatatactccattttgattttggagtatttcaggcattttttcaattcccgaatgcgcgttttcatggcctgatgccctttctgcaacatgcggtaacgttcgcgcaatgtcgaattaccttggcgaaccaggtgaaaaaagcgtttgatctccttgagtttcaatccagaatgcttaaggcaaaccagccccagaagttcttccatttccttgcggtggaagacacggcatcccgccccgtttctcgggatgtccaggattccttcttcttcaaaaaaacgcagattggacggcgtgatgcctgtcaattccgagacttccgaaatggaaaggcacatgtctttctgttctccaagttctgatgcgtcttgcatgaagacactatggctttttcttaggctgcgggaaacgacaatttccgtgtatgggcggggaagccggttattattgcctttttaaggtacatggcattcattttctcaaactgcatgcggccttccgttttttctggagtttccagcagcgctgttccggttccggtgtatttctcatattcctttacatcaaaggttccgggggatatggtccccgcgtttttcagcaaggcaatgattcttttcaactgtgattacagtgaaggcgcccatgcggatattctccgcagaatggcggaaacgaatatggagcagactgccggttacggggaggacccctattgcgaccaggcccggaagctgattgccggcttgtgcggcagaacggatctggatatccatttccttatcggcgggacccagaccaatttcacggtaattgcggcggcgctacgtccccatcaatgcgtgctgtgcgcggacacaggccatatcaatgtgcacgagtcgggagccgtggaggcttgcggacacaaggtttccgctattccttccccggacgggaagctgacggcccggcaaattgaggaggcgtggcacgcccactgggatgacgagacccgtgagcatatgcctcagccccggatggtttatatttcccagccgaccgaattgggcaccatttattccagaaaggaacttcaggaaatttccggagtctgccgccggcgggggctgtatttgtatatggacggagcacgcctcggctacggcttgtgcgatgaggacaatgacctggatttgccggcgattgcctccctttgcgatgctttttacatcggcggcacgaaggtaggcgctctgtttggtgaagccctggttctgcggcatgaggccctgaaggaggatttccgttacatcgccaagcagaagggcggccgtcttgcgaaagggcggcttctgggcattcagttcctggagctgttccgcgacggcctttatttccggctgggcgcccatgcggaccgcctggctgtgatgctgcgggatttttgccgttccagagggctggcgcttcccttttccagcggaacgaaccaacagtttgtcacgatgcccgattccgttctggaggagctggggaggaaatacggttttgcctatttgcgccgggaggatgaaacccacagcacggtgcgcttctgcacgagctgggccacccgagaggaagacgtacgggaattgatggcggatatcgcccgcctgtgctgaaatttccctccgtccggcaatgccgggaaactgcggaaagggccgttcccccattcgtttgcggaaaagcatttttgtctttccgggaggaacctgttgagccatgatatggttatgcccttaatcgtgggacaggaatggcggaggagaatttcccgcatgcagtggctgctgaatgccttgctggcggtggagtgtcttagcatgcctttttttgccgccggggcggtagctggtatggtctggtacggaggacgcaggatgggggctgactggggctggctggcgggaggcgcccttgccgccgcaggtttatttttggcggtgtgggggtggctgcggctccggggccgttttttcagcaggcgtgatacggcggcctttctggatgaacagctggggttgcatgcggcgttgagcgccggtgaggaatggggcaatgccgtggaggcaggggaaagcgcggtacaggggaattccgtgctgcggatacgttccgcctggtgcctggcctggctggcgggaggcgcggttcttatggcttgcggggcttttttgccgttgcccgcgccgcaagccgtagggcagcttccggatttgccgcccgttctggcccgggtgggggaagtcctggaccgcctggcggagatggagagcgtggataataagagcctggagcctttccgggagcagttggaggatttgaaaagaatgcaccggaatgagatgtattcccatgccggactggaagcggcggatgccctgaaggggaaaacggcagcggccgttgccggattatccaatcagatgtatcggacggattccgccctttccctgctgaacagcctgaatggagcgtccagcccggaggcgatgcagtcccttcaggaggcgttgacgggaatggagtccctcgccctgcagccgggcggcatcatgagccgccagctccaggagctggaggcttccctgccttcccggcagattgatccggagacggccctccgtctgcgggaacagctggaacgggccgcccagcagctgcggagcatgtgcgggcagtgcggcatatccctgatggcgtctccggatgaccgtaccgtgatggaagccgggcagggagagggaagtgaacccggacgaggaggaacggggcgtggacgcggggacgctccccttgcctttgagatggaagagcgcccccagcttgacacggtttccagacgggcggttcatgaggacttgagccgcgccgctctgggggaagctgcgggggtggagtcggcggctccctccccggaaggggctggaaatggactggaacacggcggccggggggctcgtccggcccgcggtggagatgccgtgtggtctgattgccttactcctcaggaacagtcagccctgaaggaaattttcagatagattgattgttttctcctgaaggccgggagcgcgtacccccctgccgcggttgtccccggggaagcaggccggtcctggtaaacagagcgtccagaacaaggaggacgcaggcgctccacagcaggatgggacggagttggaggcttgttccgggcctcggttcccggaaaatggagggaaggtccatcctttccctgcctccggtccggttcaccaggtccaggaaagcgttgccggattcaggcggcatggcccattccgggtccacctgctggctgacagggccgaaggggataacgctgccgccgatgcggaccgcgccccgcgccatgactccgtgcgggaggggaaagctgcactggaatattcccggctgcaggtgttcccagataccgttttgtgtacgggagctttcttttccggagagttccagggatatttccggcatgcgttccgccaggcgcgggatgttttcctcactgtagtaaaggcgaatccgtaaccggtctcctgccgtgtccgcccgcacggagtatccctgtgggggatttttcctgttgagccaccgggccagggtttggataaggtctccgtagccatcccattgctggatgttttttccgagttctcctcccatggcgaacgtaacggcggccgtccgtcccgtccccctgttccagaaggagaccaggggcgccgcgtttccgtcttccgttacgcaggctgctgttgctccattccttaaataacacaggttataaccgtctacggcagggggccattccggctggccggctgcaatttgaagccagccagccgtgccgcgcaggagggtacgttccctgatgaaggcggcccgggccacactgacggtttcctgtgcaaagatgctggggatatcccccggacggtcgcagaagaagatgcgcccccgtcccaattccgctatttccctgagcagtccggcatcggcacttttttccgttcccagtgcgatgacgcttacggtaaccccttccttaaccatttctttcagagtttcccggtagtcggcaggttcttcggaatcgtcggcatctgcaaagaggagcagatgccgtgttccggccacggaacgttgcagttcctgccagcccgctttcagcccggcgccgatgaagattcctccgcccatagaggaaatcctggagacgctggatatcattttcttccggttagggcccagactgcttagcgtgacaatagggtgcggttcgctgtccacggcgtggacggagatgagatcctggtcggacaacagggaaatggtctggcaggttccggcattggccagatccattttcgtctttcctccgggaacggaacaggacatggatccggaacggtccagaacgatgctcatggccgtcatgagcttcatcttgtccttcttcatttccatggaaacggggagcagttcgtcaatgggggaggagaagtagccgccggagccgaaactatgcctgcccccgcacatgagcaggccgccgccctgttcccttacgtaatagtccagggcatgcagaaagtccggcgggacggaggatgcggagaggttgttgatgatgaccagccccacgccggagaggtggcgggcatcaagccggttcaggccggacggttgttggacgcggaatccctgcgcttccaggaaaggcgccagggggtcgcggtcgtagccggagagcagcaggacgccgtttcctcccgtcacttcaaggaagctgacggcacggttgttttcagggattggatcgttttgcggcgttatggtcatttcataagcggaacagccgggtgtggagagcctgtccgccagcctcaccgtggctttgccgttgagcagggtagccgtcccccgcagcggagcccctccgtttttgctgatttgccacggaacggtgatggccgggccgggagggcctgccagggttgcctctaaaataaaggcttcgccgggccggatgcgcgccggcgttcggatttgttctatgcggatgtccgcttcccggaaggtgacggacaggcggtagtccaccggaatccgggactggatgagctgttccgccgcctggtccagcggcgtggtgggccagccgtccgtcaacatcaggatgcggttcgtccggttcggggacatcagggccatggtataggccagggcctgttccatgtccgttccggcggttcccccggcaaagacggggtctccgcgtccccggagcacggcggattgcgcgaaatccaccaatcggacgcggtccccggcatgtttgtgccgttccagaatagcctggatttcctctgccccggctgccggaattcccgccgtggaatttgattggtccaccagtatccacaagtccatgcctttgccgcccctgtcaagggcaggctgagccagggccagcagcaggcaggcctgcagaaggaggcgcaggggggaggccaggcgcagacgcctgtatttccagcctgccgccagaagcagggggatcaggaagaaccattccggggtgttgaattgaatcatgggcgcagggagatgtctgggacgggaggaagccaggaaagaatcagggccaggaacgccagcgccagccagagggaggccagagggtcacgtttcatgtgccggagcgcctcttcatggggctggggaagtcctgtgtcaaacgtggagcagtgggaaaaatctcccatccgggcgtcggagaaccagacggagccttggaacaagggcgttttcccttctccgggggggaagatttccacatatccggtttcttccgggagcctgccgttaaagacagtttcacggcgttctcccccgggcatggtttgaatgagttttccgcctgcgggcatggataagagagttcctccgggaaggttgccgtaatgtgttccgggcagattctcctgtacggattgcatgaatctgcgggtcatgagcaagggcgccggaacgcggtccgcattggatttttcccagggccagttgaggaaaaggcgtttcccgtccacccaggccaggggggattccccctgccagagcaggactccggctttttcccccggcttcatggaaccgatggaggggatgagcaggccgctccagttcagcccgtcagtcagcggatgccgttccgccgtgacagcgccgtaagatggtttgccgctggctgcaaatatgatggccgcttttccggggggactggcattttccgtttttccctccagcaggaggaggtcgggatctgagccgtccgggacgggggagaatcccggcaggctattgatgatattgcggaagatttttccggatttttccggaatttccatgctgacggcgacgggggcgggagcggagcggaccagcaggagctcattgtccgccgggaaggcgtccgtcgggagccggagcacggcctttccgctttcaggagggaggctgtattcaaattccgtgacagttcctggattcaggaacagggaacgccgggcaggaggacgcccgccttccgtatggatggagatttcgctccgaagaggggatgggctattgtttttaacggcaatcctccaatggccggggccggcggcctccaccggggttattcccgcaaaccccgcattttccagaggtttccctacaccccgtgcggattggccggcgggaaccctccgggcagtggatgtaatcaggcgcgtgattcccgttggcccggcaacggctgtggcggtgcgcagggcaggggctaggtcatgtgttccttcgcgcggctgccagagatccagggcgcgcagggcctggcggacggacggcccccggtagagcggctgtccggaagccctgctgcccatgagaacccatgtgaccgggattccgcaccggaggatggtgtccatgtcttcggagacggcattcacggcttcttgacgaaagggggccatatttgcggaatcatccagaatgaagactacggtctggccggagcctttgccgggccagacaggagcggccagaacccaggtaagcaggaggacggccagaatttgcatccagaaggagcgtgatatgcgcaacctgtcccaggcattaccctcatgggcctccggagccagcgcttccaacaggaagagcgtggccgtggcctgtgtttttgttttgtgctggaggaaatggatggcggtgatgagggggatggccagaagcgcccagaatgcggtcgtgttggtgaagtgggggatcatggcttggggggagagtaaagggtgcgggggcggttcaggagagttccacggcaccctgccgtaatgcttctccggaaagggcttccgtcagcgtccccttgcaggggatgcgggcaagaacggcctggcggcgcaggcaggcagaaatccagagttcaaaatgggcggcgtaggcgcgggcgtacctccgggacagggaaggggtgatgagctggcggcgcaggtggccggattcacagtttttgagtctggcgttgccggcggggatttccgcttcttcctgcagcgtgggggccaggatgacggacatcccttttaaggaggccatggtttccagaaggttgtccggttcccccgggtagagcaggtcggagatgaagattttcattccattggggcgccagatggaaatggagggcatggattcatccgggggaaggctctggatctgcgcttcccattggccggagagaacatcttcctggtccagggggatgatacggcgccctttcaccgcatgaatcttcacctgggctcccgttccgatggcggagagcaggcaaaattgaagcaggccccgcgtgcgtgccgcgcgctcttcgtgaaaaaacatggattcggaaacatctaccgccacgtctacctgcggtgacagttccgcccggaagactttcatggtgagctggccggttctggcgtacgccgcccaatggatatcccgcgggtcatccccccactggtaggaacggcttccctggaaatcgatggagttgcctgctcccgttccctcccaatggccctgtgttcctttccaggcgcaactggaaaagggcagccggagacggcgcgccgcctgttcggcgtccggctggatcacctggctggagaaggggaaagaggtcatggggatgggggggaggcaaaacggcgggcaagagctattcccgttcccggcgggaatttcccggtttctggagaggttcgggggatgcgttccggaatatgtcaaaccagtgtttgctggtgagagccagcaccgctattccggcagccaggtccatcaggctgaacagggaaaatttgctgaaagtcggcaatgtttcttgtctcaaaagttcagataaataccctccggggagaagggggacggacagattcacgccccacagcacgttttgcaccaggcataggatgaggcagatcatggtgtacgtcagcaaggtattgtttttcagtttttcccagaacagtttcagaagcatggccggcatggtgatggcgtaccagccgcctgctgcgaggcaaaagagccgttgaggggactggaattcggggacggatgccatgcggtctatcagatacacggcgatagccgccagggcgcagagcaacagggtgaacaggacgctccccggcatgccggggaggaacagcagctgttggagcctggagaatcttttgtttttcatttgctccatgtggatgggaaggaggcgggcaggcgtgttcaggttgataatcatcaggaaaattccgtaaaccatgacaaaaatggaatttccggtcatgatgttttgaatggagccgcttgcgttttccagaaaggggagggggaggatggaggctgcgaaaaaagccagcagaagcttccgcaggggggcagccgtgttttgtgcggcaggggagaaccattcccttgccagcagaagcagggatgagatgatcaggaaggcgtccgccaggacgaggaatatcaggagaacgccttctcccgctccatcccggaaaaaatccagctccgcatggttgcctcccagggtcaatataccgattcccatgagggagaaagcgatgatgcgcatcagagagggcatggcggacgcccacagggtatatgcggtcagcatgccggaacccaggtaaaggaggaaaaacagggttacatcctgtaccaggtcaatttccccgtagtaataccggatgagaaagaagggcagggagataaaggcaatcagcagggattgggccatgaaggatatccattttcccagcacgattcggcctgcgctctgcctggtgagcagcagcagttcgttgtttcgggtgagcagttcgttcctgatggaggtggaggccctcagcggcatgatgaagagtagggcgacgaccatggtaacccagaagatgatctggcatccgtcggggctgacgaagggctccccgtcaagaggattgatgatgaagctgaacaggaagaaaaaggagagcagggagggcactatgctgaccaggaggatgaatgacggcgttctgagaccctgacgcaattccttgaccagagcggagggcatccatatggggaaatcaagagagcgggtggtattcatgaggcggggatggatggggtttcctgggaagaggcgggattctgccgcggggccggttccccgctgccgtggataaggatgtccacaaaagcttcttccagacggcgttcgctgcggtggaaatcaattacggggaggtcgaggcagagctggcggagttccgcagccacagcttccggttcgcaggagacgaaggcggccactactttctgttgctgtacatggcgcactttccatccccggcggagggccagccattcctccagtgaggcggtgtcgtctccggcggtgcggatttcaaaggcgtatccggattccgtctggcggtgcagcaggtcttccatattgccgtcatggatgacggttcctgcattcatgaagatgagggcgtcgcacatttcccccagttccgagagaatatgggagctgatgagcagcgtttttccgcgcgctttgagcagatgcaccagatttttgaattcaaggcgcgctttggggtccaatcctgccgccggttcgtccagaatgaggaattgcgcgtcgctgatcagcgtacgcgccaggcagagccgctgcgtctgcccttttgaaagtttatcgatcatctggttctggaggccggccagttccgtgaagtccatcacttcgtccacggcgtccagtaaacgttccctgcccatgccgcaggccctggcgaaaaaatccagatattcccggacgctggtgtttttataggggtggaaatagtccggcatccatccgatgcgggaacgtgccagttcgggatgatccacaacatcggccccgttgagcctgatgtggccggagtcaggcatttccagcgtggccagcatgcgcatgagggtggttttgccggctccgttggagccaatcaggccgacgacttggccctggcggatgacgaaggaggcattgttgacggctttcagcggaccgaatgatttggacagtccggaaacttccagcagtaggggcgtactcatgtttattcgtgcggcaggggagtgacggggccggagacggtgacggaggttttttcccagttaatggaaggcagggtggggatggggcccagttccccgcccgccggttccatggatgcccggaagtgcagcgggggagggccgtccggttcttcttccggcaggaacggggatgcctgcattttacggccgggaggcagttgttcaagaatccagtattttccggaggcgtcccggtaggtgagtccgttcagggttccgggaaaggtgctttggaatacgggcgccccgccggggcgcgtctccagcagagtgagcgccgcccgtgtggaaaccggcatgatgatccggtgctggagcgtggagcggctggtgaaccattttcccccgcattcttccccttgccgcgccgcgccttctatggttttttccttaatggagccgcgcgccttgctcatgcgtgctccggtaatgccggcgttttccggcaattgaaatgtattgttcagcaggacggaggtcttgcaaatctggttttgggagatcagggcggagtggtcctgcggattaacctggataagaacttcccggctgcccgtccctcccgtgccgtctccggccagaatcaggagcagcagaagaagggaaaatcccacggaaatggccgggatcagcaggaacagcctttgccttttgcctgcgggagcccacaggaacaggctcagcgggccgacaagcacggcaaagatgatcagccccagccccagcgtggtggatggggctgagaaataatagggagcggcggaggtaatctccgggtaacagtttcccttttcgtggaggttgatgaattccttcagtttcagctttttttcttcttccggcaggccgtccagggacggaacgtgcagaatgcgcccgtttcccagcaaccgggtggaaacggaaagccccctgtcaccgatgagccacaggtttccccctcccgtcacccattggcggatggctttgcggtgggcttcgtcaaaatgggtacggtaggttttttccgggatgatgaggcaggtctgcccctcgtacatccggtagtcggctggccatttcatcaggtcgcaggaggaaacggccgcgttataggaagattcggaaagcaggtgccagtccgccggagcgccttcctggataaccgcgaccattttcctgtgctccgtatccgtgggaatgggggaagctccttcgtggttttccttcacttcgtagacgagattgtaggagaggagagggtaaacgactgcatgaacgctttcccgggccggaatgaagaacggataagtatggctggttctcctgtttccgttccacccttcatggaattgaagagtggcttttttgtccgagccggtggtgttttccagcttcacccggagagggacgcgggcgccgttcgcgctgtagtcaaatgctttctccacggaaacggcgatggggggagcggcggccggttttgcgtggagcgggagaatattgaatgccgaaagaaggaagaggctgaagaacagccatgaacgggagagagggcggcgcatgggggatgggttgaggatgtgtggtcaatgaatttttgcggcggccagggaatccggcaggggcttgttctgggcagggatttccctgaccaggcggttgatgactgcggcgggtgtctgtccgtccagacgggccgtgtggttgagcaggatgcggtgctccagcacgggatgaataacggcctgcacatcctcaaaggagcagaaagcgcgtccgtggcgcaaagctcgggctttggcggcagccgccaggcccagggccgcccgggggctggctccgtatttaacgcctccggaggattccgattctccgggatgcgtagcgttgaccagcctgcctatatagtccgccaccacttcgggaatggctacattccgggccatttgcatgagtttctgcaattcctgcgcgttcaaaaccggggatatttcaggttccacgcccatttcccggttgaggacaatgcgggtcagcacatccgccggtgtgcggttgacgttgattttgaaaaggaagcggtccagctgggcttccggcaggggaaaggttccttccagttcaatggggttctgggtggcaagcacgaaaaagggggaggggagggcatgggtctctcccatgacggtgacgcggcgttcctgcatggcttccagcagggcggactgggtcttgggggaggcgcggttgatttcatccgccagcatgatgttggcgaagacgggcccttcctggaagatgaagttttttgttccgtccctttcctgaagaaccggggttcccgtgatgtctcccggcagtagatcgggtgtgaactggacgcggcgcgctgtgatatccagtgccctggagaggcctttgaccagttccgtcttgcccaggccgggcaggccctccagcaggatatgcccgcgagccagtacgccaatgagaaccagttcaatgagatccttttgaccgaacaggacctggttcatggcggcagccagagcacggagcttttgcatggcgcagccaagttcttcctgagagaggatagggggggtattcatgggaaactgacggatttccgcggcttttgggaaaaagaccgggcatttgttagatttcttcatgaacttatgccatgcatccagaggggctgcaagcagaaagatagcgggacctgttaattttcagtaatatgaagagaaaataccctgcggggtttgagtggtaaatggaattgccgcaatatatgttccatctgttgaaaaaagaaggcttcctggcatgtattattgtcatgccttccgtatatccccccggcaacgaacgcatttacgtggtggacgctctgcgcggctttgccgtaatggcgatcatgctgctgcattttcttgaacatttcatctataattcctatcccgtggcttcttccccaatgatggaagcggccaaccagcagttcaaggaggtcttttttttcctgtttgccggcaagtcctacaccattttcgcccttctgttcggattcacttttgcggtccagtaccgtaaccaggcccggaagggaagggattttgcgggcaggtttgtctggcgcatgtgcctgctggcggtgttcgcctgcatgaatgcagcgtttttcccgggcggtgatgttctgctgactttttcacttgcaggtttgttgctggtgccgtgccgccggttgaagacatcctcgctggtggctttgtccctgtttttcctggcccagccgctggagtgggcctatgcggcggtgcagtggatgcatccgggctgggttcctccctccctgtctgttgcggaatcgtacgcttccctgaaatccgccgtggatacgggaaatttctgggtgatggcctgggagaacctgactacaggacaatgggccagcctggcatggggtattgaagccgggcgtttgatgcaggccccgggtctgttcctgctggggtttgttctggggcgccaggatttctttctgcagaatgacggaacggctgtgttctggacccgcggactgctgttttccctggccggggcctgtgcattttacgtggtgatgtgcctgccggggctgccggggcctgtgcataccgtgtttagcatgtggcacaatgtttgctttaccggcgtatgggtggccggggtcgttctgttgtaccggctggaatatttcaggaaagcgacggctccgctgctgacctacgggcgcatgagcctgaccaactatgtttcccagtccgtgatcggctccctgatttttttcccgtatgcactggggctggctccctactgcgggtatctggccagttttgcggtcggctttgccgccatgaccggacagatatggttctgccgctggtggctggagcggcaccgctacggggtgctggaaggattgtggcaccgggcgacatggctggccgccgggaaggtttccgctccggaacaccggtaagaaacgggggccggcgcaatgatgtttcccgatacttgcgggacgctttttagcgtcttctgccaaagccggtgatttatccggacggaggatgcatccggttccgcaaggggcattttggagaggagacatggaacagggggcagaggcaggaggaaaagggatgaacgtttcatggcggcgggagacatgaaagcgcggtattttttgaagaatggctttccgggagattttttccacagggaacggtctgttttcctggggatggcgtgccgcgccctctccggtccgtgttccggcggcttttccgacggactgatgcaggaggggattccgtaccagatggcgcttttctttaaaggggagatgtagtatggcatggtgtatggaaaggaggacgggcataggcggttttttcgggctggaattgccggagtacggcaatttcccgcaatggcatcccggcaggagtgtagccgtgaattccggcagacgcgctttggaatatatcctgcgccgcctgggggatgtgcgctgtgtccgtgttcccctgtatacatgccggacggtggtggaaacgatggaacggcttggcattcccgtgattacttaccgcattgacgaacgcctggaaccggaggaactgccggaattggaaaagggggaataccttttgtacaccaattacttcggaatcaaggagaaatgcgtggaccgtctggcttcccggtatggcggcagcctgattgtggacaatgcgctggccctgtattctccggcccgttccggagtggcctccctgtacagtccgcgtaagttttccggtcttcctgacggggggatcgccgtgatggatgcggagcggtccttgccggaaccggaggagcgggacgaatccctgcctgccgccgcttttttgctggaatgcctggagcatgggcaggaaagggcttccgccgcctgtgaacggaatgaacggcgcttgcggaataccccgctgcgaagggtttcccggctgacggagcgactgatgagcggcattgattatgaacaggcgcggctgctccgcatgaatcatttcctttttcttcatgaaaggctgggccatttgaaccgtctttccgtggaggcggattccttgtccgctccgtgttattatccgttttggacagcttttcccgagctgaggaacgtgctgattgataagcgcgttctgattcctctcctgtggccggaggtattggaacaggcccctgccggcagcctggaacggaaactggcgctgcatcttctgccgcttcctgtggaccagcgctgcgggccgcaggacatggaacgcatcgcccggattgtggaggcattctattcctgaagagaagggaggattattttgttagacagttggataagacgttgacgatacgtgaatgaatgttctaacatttttggtatgtccgactacctttcctctctgggctatcctttccgtggaaggcccatggtttttgtcttttccgtcatgatggtatggggcatgttcctggcggcccgggatgttctcatcggatggattgccgccttttgttttctgctgcctttcatgtgcgcctttttcatgaaaatggtgaggcagtccgccatgggagaagaggatatctgcccctttcctgaactggatgaatggcttgactccctcatgctgccttttgtccggctggtggtgtgcatcatcgtttccttcctgcctttcgccgtgtatgtgcatactgcggcctgggcggcggatattcccctggcgtggctgttcctggcggcgggtgtgatttactttcccggcgtattcatgagaacctccgttcgggaacgtttttccggtctttctcccgtgggctggtgggggctggtcagaagggctcccttttcctatgccgggttgcttggcgccatatgcgccgggggatggatcatcctgaaccttccttcagggcctttgatggatttcgccatggcgcccgtgaagctgtataccgcctgcgtgttgatgaatatgtgcggactgttcatgctcaagcatgaatttgctggggaggaagaggacggcagcttttccccttccgggcctgcggcctcgtgatgctgccgcctttccggcggcgccgggaacaggtgagtttatttggcgggttccttgtccaggttcaggatgcccagcacagacatgttgccttccgcatcttttccggaggggagatagaccttcgcattgttcagcatgttttcaaaggccttggcgcggagcatgttcggtcccatggccttttccttcaatgccagtccttccgcttccgcccgggctgcttccagggctgcttccgcctgggccttgccccgcatgacaatgactttggcctccgcttctccccgggccaggttagcgtttgcttcctggcgcgctatttccattttcatggcgccttccgcctccccgcgtgcgcgctggatggcgatgtctttccgggcgatttgaagttccgtttccttgcgttcgttttcctgagtcgtctgaactttcctgacgacggattcaatgatggcctgcgggggatttgtttcccccacggctacggaatccacaataaagggggtgccgtccagccgcttgcttaactgcgtgtaaacgttgtcggaaattttttgcaggctgccggaggcgtccagggcattgtactggcttaattccgcccgcacggctgtacggaaaggctgctgaatgaaatttttgtaggcaaagagcatgatttcgtccgccacttcgtcatcattgcggccggagctttgggcgatgccgccgtaatcttccatgaattccttgacccgggacgggtccagccggtaaaccagagaagctttgcaggagatggggagcttgtccttgcccaggatagcccctccattgcgggcgtcgaattcttccaccgtggtatccggagtgatggaaaccttgctgacttcctttctccacgcccatcccgtggaggacggcccgatcaggatgccttcaaacctgttctgtccgaaaatgggtttggaatagacatatccggcaaagccggataatacgcgcttgttgctgaaattctggaaggcaaaaatggcggcgcccgcagcgacgaagatgacggcgggaatgagcagggagaaggcggttttgggagatttattcatgacagggcagcggttgtgacggtatccaacataagaggaagctggtgaaaatcaagttatcttttcctgtgcggccgggaaaagtattctactgaaaaaactctttccggaagagggaatgcggcaaagtctgtcctcttctgaacacaggggagtgccggaaatgtcttatccggcaaaggctgcctgttccgtggggggattccggcgaggtgccggacctccgccccggaggcgggcctccatttgggttaaggtgatgaatgtagccattacgggatccggaggatttatagggagtcatttgtccaagcgtcttgagatgttcgggcatcgggtgacgcccttgcggcgctatctgtttgcccaggagggcgtggattgcctggcgcaggccctggcgggatgccatgccgtcatcaatctggccggagcgcccatcgaccggcgctggacggatgcctacaagagggagctggtggagagccgcatcatgaccacccgcaagctggtggaagcggtcaacaggctgcatgaaccgccgggagtgatgatttccgcctctgctgtcgggtactatggctcgtccggcggctgtcatggggaactggacgatccggaagcggattcctttctggcggaattgtgcgtggcctgggaaaaggaggccgggctggtgaacagctccgtgcggctggtccttacccggtttggcgtagtcctttctccggatggaggggcgctccccgagatgatgcggctggcccggttcggcgttacggcaaccgcaggaaatccggatcatcttttttcctgggtggctttggaagatctggcggatgccctggtcttcattatgggcaggcaggatatttccggcccggtcaatgtaacggcgccggagcgcaccaccaaccgggaattctacagggcagccgcggaacatttccacacccgtctgtccatccgtgttccggacgccgttctgcggttgctgatgggagaagcttcccaggtgattaccggcggccagtgcgccgttccggagacgctgatgagggaagggtttacattccaatatccggatatccgcactttttttaacaaagcattttctgtcaaatcatgagcatgatacagaccatcgttacttccctgtttcacggtcattccgtcaaaaccgatcccatgccggatttcaatctggaacgttatctgggggaatggcacgaaatagcccgtctggaaaactggttcgagcgcgggctcagcagggttcttgcccggtatgacctcagggaggacggttccatttccgtggttaacagcggttatgacgttcgtaccggggaacggaaggaggcgcgtgcacgggcggtggcgggggatgcccccaatcatttgaaagtgtactttgtaccactggtatacggccggtatgaagtggctttcctggatgagaattacacccgctccgtagtttccggcggttccctgaattatctgtggctgcttgcccgctcgccgcagttgaaggatgacgagcttcagccgatgcttcattgcgcggaaaaactggggtatgatacttcccggttgatttacgccaatgtccaggcctctccggacaaataacatggggcgggcttgaagaagcggtgtgccgtgaatatgggatatttctgaaatggggaatgtggaaaaggtggctttcctcctgccaggaaaaaatttttgggcatgggccgggcgttcctttccagtgttccgccgtgcgggaatgtcatgcttttgagttatccggtgtgattcttcttcctgcatggctccggttccgtatttttccgctttttcctgccccgttctttccgtttttttgcaaagaacagggaaaaacgcaggcgcctgcttaaaataggcttgcaatcatgagaaggatggatatgttggcattcatccaaacattggatgtttggatgaattacttaaagaaggagtaacaatggatattattcatgacaacgccgctgatctcagcgcattgaacggcaagaccgttgccgtgatcggatatggcgcccaggggcgcgctcaggcactttgcatgcgtgattccggtgtgaacgtgattatcggcgttcgccccggcaagtcttttgacgccgccgcccaggatggattccaggtaatgagcgtcgcggaagccgccgaaaaagcggacatcattcacattctgctgccggatgaaagccacggcgccgtgtatgaagctgaaatcaagcctcacttgaaggccggcaagacgctttgctgctcccatggcttcgcgtatgttttcaataccatcgtcccccccgcggatgtagatgtcatcatggtggcccccaagggcccgggcacggaagtgcgccgagtatttgaagaagggttcggctgccccggcctgattgccgttcatcagaacccctccggcaaggcccgtgacgtggctcttgccatggccaaggctgaaggcctgacccgcggcggcgtgctggaatgcaccatggcccaggaaacttatgaagacttgttcggtgaacagaacgtcctgtgcggcggtctggtggacctgatgaagtacggctttgaaaccctgacggaagccggctatccgccggaaatggcctactttgaatgcgtgcatgaagccaagctcatcgtggacctgatttataacggcggcatccagaagatgaactccgtgatttccaacacggccgaattcggcgaatattacaacggcccgcagatcctgcccgcagaggtgaaggaacgcatgaaggaatccctcaagcgcattgaatccggcaagttcgccaaggactggctggaagaggcagccaagggcgctcccaacctcaaagccaagcgcgaagccctgggccagcacccggtggaaatcgtgggcgccaagatccgcagcctgtttgaaaggaactaaggtttcttttacttgaaacacatgccgttccgtcggaatacggcggagcggcacgtatattcccgggcttttcccggaaatccgccattgattcagtttatggagcatgcctcaccggccgtcaatgtagaaaacgccagggtatacctgggcgggcacgaaatcctgcacaatatttcctggcaggtgcagcgcggagaacgttgttttattctgggggccaacggcgccggaaagacaacgctggtcaaagtgctgatggggtttgcatggccgctcttcggagccagggtgcaggttctgggcaagaccttcgggcacgtgaacctgctggaattgcgcaagtccattgcgtgggtgagtccgttcatgcacaagtggctggaggatggctcctggaacgggcgcgacatggtgctttccggccctgacggaactatcggcctcctgagggagccgccgccggaagaggaggaaaaagccgcaggaatcatgaaatccctgaaagcggagcatttgatggacaggccggtggtggccatgtcttccggggaacaggtgaaagtgctgattgcccgggctctgatgacgaatccggaactgatgattctggacgaacccagcgtttacctggatttggcagggcgggaatttttattgaaaaccattgaagagctggctgaaacgaggcctgagctgaccattgtgttcatcacccagcgcattgaagatatccttcccgtatttaaccgcggcatgattttaaagtccggagaaatcgtggcgcatggaagccgggacgaggtgctgacggaggaaaacctgaaagacgcctttgggctggatatccagttaatcaagacggagaaggggcgtctctggaccgttatccgataatttttcatgaagcagtccaagacaatggagctgaagaaaccggtgcgggtgtccctggcccgccaggtgcttaccgccatggaatccatgatacggtccggcaaatggaaggttggagaccgcattcccgcggaagcggaactggcccgtgccttttccgtcagccacaataccatccgcgaagcccttcaatccctgattcacatggggatgctggaagcgcgccccggggacggcacgtatgtgatggcgtcagaccgctttgccgtcgcggtgagcaaccgcctcaaggaatccgagctgcctcagattctggaggcgcggctggctttggaaaaggaaattgcgcggctggccgccgttaaaaggacggatgaagatttgaaggagctggaaaatgccctggaggactgccacggcagggtaaggcagggcattgaggatgacatgctgtttcatgccgccgtggcccgcgccacgcataatccggtgctctcggaattgtataacgtggtcatccgccatgtgcaggagaatctggaaaagctgcttcaggagaagcaatacgactccggcgccatgaagctgcatgacgaccttctcgcagccatcaggaagcaggaggcggatgaagcggagaacattattgtaaagattgtggaatttgacaccgtcagcataggcggggcattcatttcttgaattgccggcagggaagatgccgttgcggtggcagagttattcttttttatttcccggtgcttttcttgccagcgggctttccggcaaataactgcgttctggaattgcctgccaaattagtctttccgtacaaaggcgccggaggcaattctcatgatttttatccttttccggatatggaattttactacaattcgaatatggctacccgtactgaatggaagtgcccggcatgcggtgcccttctggctatggaagatgtgaatatggctgcggatatggtgttatgccgctcctgcaataagataagcaaattttcagagattgttcaggaggaaagggatgaggaaattctggattccattccccgccgcatgagcgtgacgaaaacggcgagggggctggaaataacgtataagaagccaaaaggagcgggactttttctactgatgttttcggttttttggaattctgtgacatgcgttgccctgtttgcggtgatgagggaaatgtcttgcgaaaatctgttcggactattgtttttaatcccttttgttctgattggggctggtacatttgcgggagctttttatgtgttgtttggccgtatgactctgatcctgacgccaggcaggggggaattgttccgaggagtagggaacctgggccgccgacagcattttttgctggagaaaggttcccgtatttccattgaggcaagcagtatgcgacggaatgatgaagttttagacaaggttgtagtggggctgccggacggcaagacgtttgaatttggtacagggattgaggaagtggaggcccagcagtatatagcggctctgctgcggaaaatgaggggatagggctgtgatgcctgaatgcggagaaggtcttggaatgccctggttccgctgtttttcagcaggcaggggaatccgtcttggagggaagggagcggggatatggatttccgtttccgggaaggaatgggcgcaagccttttttgttggcaaaatccatggacagcgggcagggtttccatttgaggcatgatagcgggaattccgggaatgaggttttttgattgatatggagaataaggtacgtagattaacgtatgatgaaggaagtgcgccttttgttaattctgtgcggtttgttttgcggaacggcagttgcgcagccccgcctttcctcaccgccgaacatgattgtcattctggcggatgacctgggttatggggatttgggctgtacaggttccaagcagataaaaacgccttcccttgaccggctggcaagggagggggtgttctgctcccgggcgtatgtgacggcgccgatgtgttctccctcccgcatgggactgctgacggggcgtttccccaagcgttacggcatcacgacgaatcccaatatccagatggattatcttccggagtcccactacgggctgccgcagacggagaaattgattccggagtatttggctccctgcgggtaccggagcgcggtattcggcaagtggcatcttggccacacgaagggatatacgccgccggagcgcggttttacgcattggtgggggttcctgggcggttcccggcattattttcccgtgaagaaagaggctgaaggcctgaatccctccatgattgtatccaattttacggataagacggacatcacctatttgacggacgatattacagaccgggcggttgaattcctgcaggaagccggaaaggataagaaaccgtttttcatgttcgtttcctacaacgccccccattggcccaatgaagccaaaccggaggatatcgccaaattcaggaacgtgcagaacggggaacgacgggtttattgcgccatggtatatgcgatggacaggggaataggccgcattctggatgccttgaaagcggacggtttggaaaaggataccatcgtcgtcttcctgtcggacaatggaggcgctccggaagcttcttcctgcaacgcccctttccggggtgccaagaggcagcattttgaaggaggtgttcgcgtaccttttattatcagatatccggcggacaagcgtttggttcccggaagcgtttgcagacagcccgtttcctccgtggatttgcttcccgctttgctgaaggcgaatggccgtcacattcccaggaagctggacggcatggatattctggagctggtggggaacaagggagctcccgttccgcgcacctttttctggtgcacggattacacatccgctgtgctgaccggtgatatgaagtacctgctggtcccggatcgcgctccgcagttttacaatgtggcggacgatccccaggaacagagggatttgtatttttccaggcaccaggatgcggatctcctcgctaaaaagctgggaacatacctgactacgacgcctgcatgccgttttcccgacagtatcagctggtccgccaaattgatgagggagtatgacaagactgcgccggacaggcagcctgagtaaggctgcgttggctttgttccgtattccgtcctgcatgccagcgtttgggaacctattactacggcgggagagggggaggaaccgcgtgcatggttttcttttcccgctgaaaaacgctttatttcaggcgcttgggttccgtaatgcggagaatgtgctctccgggaagggctaggttgcctttgtcccgggcaatcatttcaaagtagtggggatcctgtgagatccagatgaattcgttttttgcctgttccatctgctccctggatttttccagatgagcctgaaggaaggaacgttcatgctccagggagcgcagatccttccatggtttgaaacacaccagggaaagcagcatcgtcaggcacagggccaggacaatggcaaagaggcgcagggctctctggacgatcagggcacgtttctcccggcggatttcaagctccgccagggtaaaacggtggtagtagcggcgtctccagagcattccttgcagtcaaacaacatatttttgatcatagaatatgaattttaccaccataaactgcgtcatttcccagttcttcttcaattctaagcaattgattgtatttggccatgcggtcggaacggcttagagagccggttttgatttgccccgcgttcgtcgctacggcaatatccgcgatcgtggcgtcttccgtttccccggagcggtgggagatgatggcggagtatttgttatccttggccagttccaccgtatccagcgtttccgtcagggaacctatctggttgactttcaccaggacggcattcgctacatggcgggaaatgccctgattcaggaattccacattcgtcacgaacaggtcgtcccctaccagctgggtattgccgcccatggctttagttagctgttcccagcccagccagtcgttttccgcacagccgtcctcaatggaaatgatggggtattttttctggagttcctgatagtaagccgtcagttcctccgctgttctgcccaggccgtctgattttttgaagacgtacaggttccgggagggatcgtagaattcggaggaagccacgtccagggcaatgaagatatccgtgcccagggtgtacccggcccgttttacggcctgtgcaatgcattccagggcgtcgtctgctgatttcagggccggggcgaatcccccttcatcccccacggcagtggaaaggccgcggtcatgcagcacatccttgagcgcatggaaaacttccgccccgtagcgcagggattcccggaaagtgggagcccccttgggcatgatcatgaattcctgaaagtcgatgggggagtccgaatgggctccaccattgattatgttcatcatggggacgggcaaaaccttggcgttcggtccacccaggtatttgaaaaggggaaggttgagctgaatggcggcggcttttgccacggccagggagacgcccaggatggcgttggcccccaggcgggatttattgggcgtgccgtccaggtcgatcatgattttgtcaatggccggctgcagggtggcatcgtgccctgatatttccggggcaatgattttattgatgttttccacggctttaagcacgcccttgcctccgtagcgcttggcgtctccatcccggagttcccaggcttcatgttctccggtggaggctccgctggggacggatgcgcgtccgatagctcccccggcgagggccacgtccacttccacggtgggattgccccgtgagtcgatgatttcacggccgcggacgtcaatgatttccatttcattcatgatcataagatttctttttgtcctttttagacagggaaacaggctttcccgttccggagaagcatgtcatgtccctagaagttccggtttcaaaagcaggactgacgcagaacggggacgaagcttgccggcttcttcagggccatgatgccccgcagaatgaagaggttcccttgctgggcatccgcctgcccggtcttaggaattttgccgggaagaagctcaggagaatctggcaggacaggaggtcggcgaggtgcatgaaccctcaaaggggcaggagcagccgcttttgcacggcggaaactgcggcagggggggaagttgcgccgtttagggaaggacggcatgccggaacggggccttgattccgtcccgttccgggtatggaatgaggcgcttactattaaaaccatgcctaacattaacgataacttcctcaagttgcaggcgggatatttgttcccggaaatagggcgccgcgtgaatgcgtttgccgaatcccatccggaggcggccaaaaggctgattcgctgcggcatcggcgatgtgacggagccgcttcccatggcggctattgaagccatgcaccgggccgtggatgatttgtccactcatgaacgttttcacggctatgggccggagcaggggtatttctggctgagggaggcaatcgccaaaaaagcctatcaggcccacggcgtgcatgtggaagtggatgagatttacgtgtctgacggagccaaatgcgacacgggaaacattctggatattttcggggccggcaacagaatcgccgtgccggatccggtttatcccgtgtatgtggataccaatgtcatggccgggaataccgggagttccagcccggatggttcttatgaagggctggtgtatctgccgtgcactccggaaaataattttgtgccgcaattgcctgatgagcatgtggatttgatttacctgtgcttcccgaacaatcccaccggggccgtagcttcccggaatgaactgctgaaatgggtggaatacgcccgggcgaaccgtgccattatcctttatgattccgcttatgaggctttcatacaggattcttccattcccagatccatttttgaaattcccggcgcgcgggattgcgccattgagttccgttccttctccaagcaaggaggctttacaggggtgcgctgcggttatgtggtgattcccaaggaattgcacggatatgattccgaagggaacaaggtttctatcagccggctctggagccgccgcaccagcacgaaattcaacggcgcttcctatattgtccagcggggcgccgcggctttattcaccatggagggcatggcccagactgccgcgctcatcagccattacctggggaatgcttcgcttctgctgaatgcctgccgtcaggcgggcatgcgcgtgtggggcggggaaaacgccccttatgtatgggtacagtgtccggacggtctggacagctggcaaatgtttgacaagatgctgcatgaggcgaatgtggttattacgcccggttccggttttggttccaggggggaagggttcttccgcatttccgcgtttaattcacgggaaaacgtggatgaagtctgccgccgcatccacagcctgtttgccagatagaagggcgttttcagacagatgtccaggccgcggtgcaaaacaccgcggcctgtgtatttctttccgggtgggttgatggccgtggcattgtatttcctgccgggaggggagctcctgtaaaaaggtcatcttcctttcttacggatttggaccgggaaagagcagagtccgttttcaagtgatgagattccggtaaaggggcgtttctatggcatattcggcccttgcccccgttcatttgtacggagtaggttgttgcttatgtccccgtgggtgcgcatgagttcctttttccggcaggctgcttttcctgcatgttgcgcctgcctgctgtctgttgctggcgccatccgggggcaggaaggggaagcggagcttccttctgtggagccgctttcctgtgcgcatgccccggatgggagggtaacagttcggggggcggttatgggtacggtgttcacggtgcgcgcttatcccgggagtggcatggacgcggaagatgcggagaggatttgcggggaggctctggcctgtgccgtccactgggaaaaagtgatgtccgccatggatgcggagagcggtctggcccggcttaatgctgcggaatacggcatttccgtgcctgtttctccggaattggaaagggtgcttcttctgtctctgaattatgcccggctgacaaacggtgcttttgatcccacgctgggaccctgcattcgcctgtggaaaaagagccgccgccttggcgtcctcccgtccgatgcggagcgggaatgtgcgctccgggcatgcggatgggaaaagttgtccgtccgtaagggaatggcggtcaaggcggtttctggaatgaggctggatttgggaggcatgggcaagggctttgccgtggaccgaatggcggagatgttgaaaacaaggggtatatgttccttcttcatagacagtaccagcgatgttctggccggcgctcctcctcccggggaaccgggatggcggctgcgggtggatacaggaagagggcagggggaagtgttgctgttgagccatgcggccgtttccacttccgggagcgcccgtcagatggtgaaaattggcgggaaagcgtattcccacgtgcttgatccccggtcggggctgggcgttacggaagggaggcaggtgagcgtccgggcgtcttccgctgcgctggcggatgccctggcgacggcagggtgtgtgatgcgtgaggaggagttccgttccctggcggccggattgccgggagtgtccgttccggccttttttcaaagtccgccatgttctgcgggggaaacgcagaaacaggatggactgcggaaggagggaggaatggggtcaatgaaaggaatgacaaagcaactacgtttttaagatacacctttataaccctgtttatgagattgtaccattttttactccctgccgttgtcagtgctgccgtatccgcatcatttggggcagagtttcccaatccctatcctgcgcccgctcccggtgtccgcctgactccagagattccgctttcaccttccattaatggcgcccgtatcgtcggggctacccccggctcccgcatgctgttccaggttcccgtctccggggagcggcccatgaaaattcaggcaacagggctgcccctaggcctgaagatggattcgcgcggattgattgcgggtaccgctccgtccgggaagagggaatacaaagtaaatatccaggcctccaacaggcatggaaaggacatgaaggagctgattctgaaggtgggggacgaattgtgcctgactccgcccatgggctggagcagctggtattcctacagtgaggccgtagggcaggataatgtgctgaagacggcacggctttttgtggaacggggtctggtcaatcatggctgggcctatatcaacattgacgactgctggcagggcaggcgcggagggaagtatggcgccattcaacccaataagcgttttcctgacatgaaggccatgtgcgacgctattcacgccatgggcatgaaagtgggcatttattccacgccttggatgggaacgtatgccggttttatcggagggagcgcgcccaacgctaagtcggactacggggaaatggccattccggaaaaggagcgcaagcaggaggatcaaatctttggaagttatccgggagttcatcgcagaaaggcggatcatgtgggagccgtctggctgtttgaccgtgacgctaaacaatgggcggattgggggttcgattatgtgaaagtggattggaatcccaacgatgtgtctacgacaaagcgcatccgcaaggcgctggacgagtccgggagggatatcgtgctcagcctgtccaatgccgccccgtacgaacatgtggaagagctgggcaagctggcgaatttatggcggacgacgggggatatccaggatcactggggcagcgtcagcggcatcggtttttcccaggaacgctggcagaagcatatgcgcccgggacattggaatgacccggacatcctccagatcgggaagctgggcaaacccaaccagcccaacaccacgtttgtccagacgcggctgactccggatgaacagtacacccatgtgaccctgtggtgcctgctgtccgctccgctcatcgtctcctgtgatttggagcatattgattcgtttacgatgggactgcttaccaatgatgaggtgatagcggtggatcaggatccggctgcccgtcccgcccgcaaagcgtggcaccaggggaatttccaggtgtggatgaaggagttgtccgacggttccgtggcggctggctttttcaataccgggaaggagaaaggaattttgaaggtgaatctgaaggagctggggctttccggagcgtatgaggcaagggacctctggaaacgcgctgaccaggggaccgtacagggagatatggcggtagaattgaacgggcatggagcatccatgttccggttcagcaaaaagaagtaacgggaaggagacggctctgtattcattcaggggcggcggggatatgccgcccctgaagcctgtggcaggggaggcttttcattgaaccggcatccatagaaacaagccttctgcacaaaatcccacttttacagtacctgtcggcggattgtcggattccaggaggggcaggaggggcaggaggggcagtgaatgcctcccccgcaccagagcttgcgcttcaattccggaaagttttctccggcaggcctttgttattgtgtaataaaaaaccgctccggcagatccggagcggttcttataaaagagattgatgtgacttgccttaatctctcccgacagcttttctaggcggcaatgccgaaatgctgttgaatggaggcgaaaatcttgtcgcgacgggcgcgggctttttcaatgtcacgggttttcagcgagaatctcaggcgttccgccgtggagtccggcttgtgaaccgtaacgtggcaccaccaaacccccctgttgttccacaggtggtggttggggttgtcatcattaattctaagagcaattttggtttgggctttcatctgtgtgatcttttccagtagaggacgtattgtttacgtccgttggcatattaatgtttcaataaaaccttcaacttggaggtgcctcacttaagcagatgatcccttgtctttttggacatctttttctgccagttgctcacctcgttgaagccttagagttcaagtggtggaacaacgttcaaaaaaagaatcttttttacaggagacctacttttttaagagtgttgtaagcaccgttcttgttgatcgtacgcagggccttggcggaaatcttcattttcacgaattgaccgagttcaggaacccagatgcgcttctcctgaaggttggggaaaacggtacgattgacagtcttagtgacgtgacgaccaataccgccctttttcttggcaagaccggagcgatggatacgacgacctttgtgaggcatggtacctctgatgatgcaaattcgggacatggcaatcgaagttatttgttaatgcgagagagataatctagcgtatttttgcctaaggtcaagaacaaccggacgaaagcactggaatttatcctagactgtacggaagcatgccttttcttttgcgcgaactccgattttttctcccatgatgaagaggggctgcagaggcggtgagctgaaagcgggagggggctgctccgggaagatgaacggtaccgcagacaaagaggagaatgaggcgttcttccatattttttcaggacttccgctgtgggagcaggggcgggccggatgaaggcttttcaccgcaggaaaagtgcagaacacgggaaagatggccccctttggttttttcacggcagcggcatatggctgcctgcttccgggtaaaacgtatccggcgcttgcacggaggggcgttccatgagaaattgaaagcatgagtgagaatcattatgcagagttttccgaatgcagcatgaagccccaggaggtgctggaatacgtttccggccccattcccgttccggaggagggagaagttctggtccggatgaaggcggctccgatcaacccggcggacatcaattttgtacagggagtttatggtttgaagcctgtgctgccgcactcccgcgccggcctggaaggctgcggcgtggtacaggagtctcgcgcagagggattccgagagggagatgtggtgattctcctgcgcggcgtgggttcctggagcgagtatgtggcggttccctccgtgaatgtcatgaagctcccggtgaaggtagatcccgtccaggcggctatgctgaaggtgaatcccctgaccgctctgcgcatgctggaagggttcgtttccctggaaccgggggattggctggtgcagaatgccgccaattccggagtgggaaggtgcattattcaactggcccgtgaaatgggcgtgaagacagtgaattttgtgagaaggccggatgaattgagggatgaattgactgcgctgggcgccgatctggtggtgggagaggatgacggggatgtggtgaagaatacgctggccctcctggatggaaagcggcctgtgctggcttccaatgccgtgggcggggaaagcgccctgcgcctgatggatatgctggctcccggcggaagcatggtgacgtacggagccatgagccggaagagcatcaaggtgccgaacggttttctgattttcaagggtattaaactggagggcctgtgggtgacgcagtggcttaagaatgcccctgtttcagagattgaggccgcctatgagaaactggcgcgcctgatggcggacggcaggttgaagcaggctgtggataccgtttatccgctaagcgatgtgcggaaggctgtggagaaggcgcaggaggagttccgcagcggcaaggtggtgcttagcatggattgcgcctgatgcgtggaaagggagtttttgcgctttcccgtactgcggaatgctggaaggattttttcagcgttccgtgatttgggtagtattggctgctggcctggatgatggcggggctgagcctttattccatatggcaggcaggcgttttgttctggaaaagagccgttttgcccggaaaggtctgtgtacggagggaatggtgcggagcatcacgaaggatacggtgcggttgtggcgccattcgcggatcatgaaaccgtccggactttctctggatgtctgggcgccggaagtgcgttcccatccgcagacccgggagggacggcgcgtgcgcgccgtttggtttcagcccagcgtggaatcaagccaggtgttgagtatttccacagcggctacctggtcgatgatggggcggaagttttttgcctttttgccggcggcgtgcagtttttcctgggcaatgacggtggtgaggcattcatccatgaaaatcaggggaaggccgggaagggctgcggccagttcccggccgaatgcgcgcaccttggttgcggcggttccttccgtgccgtccatgcggacgggaaggcccagcaccagggtgcgtattccccgttcctggacgagctggacaatgcgggaaattccgtccgtctgatgcctgtggatagtttctacgggatgggccatgatgcccacggggtccgtggcggcaatgccgatgcgggcttctccgtagtcgatgcccagggcggggtgcggactggtcatctgagttcgtccggaagctggttgacgattttcttgatttcgtccgccttgtttttatccgcaatgaggatggcgtccgccgtttccaccacaatcaggttttccactcccagcagggccacgtgcttgtcccccttttgggagaaaacaatgttgccggaggcgtcctgcacggtgatgtccgtgttggtggtgtttttattgtgggtttccagatagttggctacggagatccaggaacctacgtcgtcccagtcaaaggttgcttccatgttcagcactctgtccgcatgctccatgagcgcgaagtctatggagacgggggtgagcgccgggaattcttcccggatggtttcctgcggggccggagattctgcaacgtgttccacaaaggaggccagttccgggcagtgcttgtccagctgttcgcacacggcaggaatgctccatacgaacatgccggcgttccagcagaaattgccccggctcaggtaggctgcagccgtggccgtgtccggtttttcgcggaattgaatgacttcgcggcaggaacagcccggagcggagtggatttcttttccgcgttcaatgtagccgtaggaggggcagggccaggttggcttgatacctacggtgacaagtgctttttccctggcagccgtgtccatggcggctttcatcagggtgcggaaggagtcctggtcctgaatgagctggtcggaggggataacgagcatgactccgtgcgggtccgccgccttgatgagaccaatgcccagggcgatggcaggcgccgtgtcccggcgcacgggttcggaaatgatgttgtccacgggaatatcgtgggcctggcggcgcacttccgcttcctgcagatggttggtcaggataaagatgttttgcctgggcaccagcccgtccagcctgtcgatggcctggcgaaggagggttccttctccgaacatgttcaggagttgtttggggcggtggtcgcgggaaagaggccagaaacgggtgccgctgccgccggccagaataagagcgtattggttcatggctgtttcgcaggaatgggggttcaagagggtcagagagcgccgaaacggcgttttctacgggagtagtccagcagagcagcttccatgtcccggtcgcaaaagtccggccacaacgtgtccgtcacatgaatttccgcatagctgatttgccagagaagaaagttggagacgcgcatttctccggaggtgcggataagcaggtccggttccggcatgccggcggtgtccaggtactcgccgaacaggtcttccgtcacggcatccggcgggagttctccgcgggagactttttccgctattttcctggcggcggcggcgatttccccccggctgccgtaggaaatggccagaaccaggttgagcctggtgtttcccgaagtggcttccagactgttctgaagcagtttccgggtgcgggcgggaatgcgggagagatctcctatggcgtggaggcgcacacctttttccatcatttggttgaggcgttttttcaggaattcgtgcagaaggagcatcagcgcgcgcacttccgtcttcggacggttccagttttctgaggaaaaggcgtaaagggtgagccaggggatatcatgggccatgcagaagtccgcacagcgttccaccgtatctgctcccgcccggtggcctgcctgccgcggcagatggcggctgttcgcccagcggccgttgccgtccatgatgcaggcgatgtgagtcggcagtttttccttgggaatggtaagcatagataagcgtcgctccgttactctagtccatgaccggatccagttcaacacgcaagttgttcaggatgtattcctgtctttcccgcgtgtttttgcccatgtagaaggacagcaggtcttttaccttgtgggagtcttccagccggacgcgatccaggcgcatcccttccccgatgaaagccttgaattcctggggggagatttctcccaggcctttgaaccgggtaatttccgggtttttccccagcaggccgatggcttcctccctctctgcgtccgagtagcagtaaatggtttgctgtttgttgcgcacgcggaagaggggggtctggaggatgaagaggtgtccctcccggatcaattccggaaagaactggatgaagaatgtcatcaaaaggatgcggatgtgcatgccgtcgtcatcggcgtccgtggcaatgactaccttgtcatagcgcagttcctccagtccgttttcaatattcagggcatgctggaggaagttgaattcctcattttcatagacgactttgcggctcatgccgaaggagttcagcggcttgccccgcagggagaaaacggcctgggtttccgcgtcgcgcgccgtagtgatggagccggaggcggagatgccttccgtaatgaagagggtggtttccccggcgcgggagtgcttggagttgtaatgcacccggcagtcccggaggttcttgttgtgaattttggccttgcgggcgttttcgcgcgccagcttctggataccggagagttccttgcggtcccgttcggaatccttgatttttgcttccagagctttggccgtttccgggtttttgtgcaggtagttgtccagctccctggcaatgaagttgcccacaaaggtgcggatggtttccccttccgggctgatggtgttggaccccagcttggttttggtctgggattcgaagacgggttcctttaccttgatggagatggcggctacgagggaggaacggatgtcccccgcctcatagtttttcttgaagaagtccctcagggttttgacgatggcttcccggaaggccgcctggtgggtgcctccctgggtggtgtgctgcccgttgacgaaggagtagtgctcctccccgtattggccgccgtgggtgaaggccacttcaatgtcatgcccttccagatggatgatggggtacagggggtcctcgctcatcgcttccgcaagcaggtccagcaacccgtttttggagatgtagcggcggccgttgaaatgcaaggccagccctttgttgaggtaggagtagtatctgcacattttttcgatatactccggccggaattgcgtggccgcgggaaagatgtccgggtccgcgtggaaagccgtgcgggtgccgttgggttcctccgtggctccgtccttccgtcccttggggatttcctttccgcggcagaactggtaggaacgcgtttccccgtcgcgataggcctggatttcaaagaagtcggacagggcgttgaccgccttgatgcccactccattgaggcctacggattttttgaaggcgtcgctgtcatatttggccccggtgttgattttggcggcgcagtccagcagtttgcccagcgggatgccgcggccgaagtcgcgcacttcgcacaggccgtccggagtcacgtcaatggtgatttttttgccgaaccccatcacgaattcgtcgattgagttgtcgatgacttctttcagaaggacgtaaatgccgtcgtccggggaggctccgtcacccagtttgccgatgtacatccccgggcgcatgcggatgtgttccctccaatccagggttttgatgctgttttcgtcgtaggccatgtgcaacggggtcgcgcttattatagcggcgcccccggaatttgcgaagaaaaaatgagaggccgtccgtctgcgttcgatggagcttgacccggaggccgtcccttggtggaatccacggcgtatgatcagttgcaaggctccgtgcaaagtgaacgtttccctccgcgttctgggaaagaggccggacggtttccatgaggtggataccgtgatggttcccctggatttgtgtgatgtgctggagttttcgccggcggcctgtctggagatgagctgcgacgccccgggcgtgcctctggatgagagcaacctggtcatgaaagcgggacggctgatggagcgggagctgggaaggcccatgccgtggcatgtccgcctggtgaaaaaggtgccccatggtgcggggctgggcggcggcagcagtgacgccgcatgcgtgctgcgcaccctcaatgagctggaacgcggaggtttgtcccgggagcgcctggcggagctgggcggggaaatcggttccgacgtggggtttttcatttatggcgcggcgagccgctgcaccgggcgcggagagaaggtggagcccttgccggactggaaggggtggcgtccccgggttgtcttgttgaagccgtcgtttggtgtctccacgccggacgcttaccgccgctggtccggttccagggaattgcccggcattccctatggggagcaggatgtggacggccatgtgctggtcaatgatctggaaaggcccgtgtttgaaaagcatttattcctggcggaagtgaagcgctggctgatggggcggcccggggtgcgcggcgccatgatgtccggttccggttccaccatgttcgccgtggtggaggatgaaggaaccggacgcgcgctgatggaggatgccgcccgggagctggaccccactttatggatgtggtccggcctggtgatgcaggatgacgcgcggtaaaaacatgattccgcaggaggccttgccttgacggagggggaggcatgccgttacactccgtccatgattaagagtttgttggcaggcatgatggtggcggctgtatgcgccgtccaggccggtgaatatggggacagcgccgtccgggccgcccgggagctttccggggcggtgaagacgggcgacatgatgtggatgattgagaagatgtacccgcccatgaagaagcagcttgttgcttcctttccaggcggggaggcctccttcatggagaccatgagggaaaagatgcaggccgccgccgccgtgatgaaggaacgcggcatggtggtggagacgtatgaaataggccagcctgcggcggaacatctggtgaagggcggcggggaggtgctggtggtgcttcccacgcggatggtcatttccatgaagcgtccggacggggtgcccgtgaaggtggagaataccggtgtcctggtgctggtgaaggatttgaaggataaggggccctggacgttcatcgacgcttccagaatgaatgcgaacggcttgcgctccatgttctatgacctgcctgaaaaggtgaatcttccgccggtttcttcccgccagcttcccgtgggccagtaagggggggcaggttcccacatatgaaggccgacggggaagagggcatggaaggcgtcagcgcttttgaggcttatgtccaccgggcatttgccccggacggattgttttcccgcgccagggattttgagtaccgggcggagcagcagagcatggccctggctgtggcgagggcgctccaggtggatgcgccgctgctggtggaggccggcacaggcgtgggcaagtccctggggtatttgctgccggcggtgaagtttgctttggattttgaccggaaggcggtgatttccacgcataccatcaatttgcaggagcagttgttcaacaaggatattcctctgctgcgcaccgccctggggattgatttttccgccgccctgctgaagggcaggcagaattacctgtgccatacccgcctgcggcgcgcgctggcgcagatggattccctctttacgcagggtgaggccgcggagttgaagaggatccaggactgggccctgagaacgcaggacggtaccctgagcgatatggcattccggccgtcttccaaggtatgggccatggtctgcagcgaaccgcatgcgtgcagcatgcgccattgcggcccttcctgtccgtaccaggcagcccgcaagcgggttctggaggccaaagtagtggtgcttaaccataccctgtttttcgggctgatggcccaggcggaggattccgaggaggcggggttcgtgtttcccggggattttgtgattctggacgaggctcacatgattgagaacatcgccgcccgccagctaggcgtccagctctcggaaccgcatttgaattatgaattgctgcggatgtacaatccgcgcacgcacaagggtttgctgaaaccgctgaacaatccgtccctgttccagcgggttcaggacgtgatggacgcctccggcctgtttttccagaatgcgcgggatgacctggggtttgctggttccggaaagattgtccgcattcttcagccggagtggtcgcaggatattctttctcagcctttgatggaactgatcggggaattgaaaacggagagggagaagcaggaggaaaatgcagccgtgaaggatgagctggcggatatggccgcccggatggaggaggcgcaggcttccctgaaggtgttgatggacatgacggaggaaggtcacgtatattgggcggagcgttccggtccggatggaaggaacatgagcgtttgctccgctcccgtggaggtgggagatattttgagggaacgcctgttttccgccggacgttccgccattctgacttccgccacgctggggaccggagatgcggatatgagttattttgcggggcgcgtaggggcggaaagcgttcggaagcttcagatcggaagcccgtttaattactgggagcagatgcggctgattgtagcccgctccatgccggagccggaccagccggagtatgcggaagttttgccggaatggattaaaaggtatctggcggagtcccgcggcagggctttcgtgctgtttaccagctatcgtctgatggttcaggcggcggagaaagtgcgtcctttttgcgaggaacagggatggacgctgtatgtgcaggggcaggatatgcagcggcatgccatgctggaggcgttccggaaggatgtggacagcgtgcttttcggaacggacagtttctggaccggggtggatgtgccgggagaatctctttccaacgttattgtcacgcgcttgccgtttgaagtgccggatcatccgcttgtggagtcccgttttgagagtatcagggaacgcggggggaatccgttttacgaatattccgtacctgtagccattctgaagctgcggcagggggtagggcggctgatccgcaccaggagcgattccggcatggtggtgattcttgatccgcgcgtagctaccaagaggtatggaatgcgttttctcaagtccctgccggaggcccggctggagtttgtatgaggttttttcaggatgccccggaattgttccgttgcctctcctgccgcatcaggaggtagctgaggggttgttccaggcgcgcttcttccagaagggagcggtctgcaaagatgtcgggaacgggagcgtctgccaggatggaaccgtctttcattacgatgcagcgcgtgcacagatccatgaccatgtccagatcatgggtagcaatgattttggtatgggtgaattggcgcaacaggctgatgagggtacggcgggaggcagggtccaggttagcgctcggttcgtccagcaccaggatgtccggactcatggagaggaccgtggcgatggagacggcccgtttttcccctccggaaagatggtgggtcattttgtctgtcagggcttccgcatggacattccgcagggcctgttccacgcggcggcggatttcctccggggggagccccatgttgagcggcccgaaggccacgtcttcccggacagtaggcatgaatagctggtcttccgcctgctggaagaccattcccacgctttcccggacgcgggcgacggttttgggggtcacgggaatgtcccctacccgtacttggccggaagagggggtcagcaggccgttgaggtggagcagcagcgtggatttccctgcgccgttcccgcctacgacggcgacggattccccgtgggtgatgcgcagggaaacgccgttcagcgccggaggggaatccgggtaactgaaacacaagtcaatagtttctacaaggtggtggctcatgggatgaggctgcgggcgtactggcccgcgagcatggtgatgttgaaacagcggaacagaatgacgagaatacagaaaagaaggcctcccgctgcgccacggccagtgatgacgctgcgggaattgacgaattcaggatcttccccgcctctgcacaggacggcctggtaaatgcgttccgcccgcccgaatgtccgcagcagaagttgtccggccatagccccccacgtggaaagagggatgggcccggagcctccccgccgggagcggaatgccatcagcatatgttggcattcatccaccaggataaaggcgtaccggtacaggaaggtcatcagcgtgattagaatgcgcggagcgccgagctgcctcaggccgcggcagagaggcgcaaagcctgtggaggccaacagcgtgaaggcacccaggatggtgagcatgcacctcaggatgatggagatgaaggagatcatgccctgcgtgacgggaatgccgaaccattctcccatgggagttctgtccaccagagggttgaagaggcctatcatgacggcgacgggcagcagccacagggtacgtttcagaaggtagcccaggggaaggtccgccaggcggatgacacagaccgggaacaggaagaaaggcaggagccccgtaatttcctgcggaggccaggaaagaacgcagatttgatagacgaggaaagctccgattttaatgcgggcgtccagacggtggatgccggtatttccgcaggaaaaccgatccatctggcggaattgctgcgaggcgtccgtaaacagtggcatggggagggtcagcgggggcagtggctgtgcggttttctgccgaacaggaaaccggccgcaaaaataagggctgcgataatggcgcttcccagcacgccggccatgctcgtttcagggttgacaatggaggaggaagcttccgtttctgcggtgtttgccccgtcatcagcgggaaaggcgtagtccggcataatggcggtggcctcctgtacggtttccaggttccggtggaggggggacggttccgccagcctggtttcttccgacccggtgactccggctacagaccattccagcccgtcaggataggcggaggcgaaccaggagagggcggctccgcagagcagggccgctaccgcaaagatgcccaaaacggtccaggatgcttttttgacggttccggtttccaagtcgaccgggcgcaggagggacggctgtgccttgctgatgaagatgacgacggctgccgtagcaaggccttctacagcgccgatggccagatgaatgggcagcatcaattcaacaaattgggcgaagggcagggctgagatgccggaggccgttgtttccagaacgacggagaaagcccccatctggagcccgatgacggcggcgatgacgctggccagcgtgatacggcccgtgccggtttttgttccggccaggggcctgtaaatgaaagggtaagctaccaggcaggagaaaaaccccatattgaaaatattgcagcccagggccagcagtcccccatccgcaaagaaaagggcctgcaccgtcaggatggccgccatgaccaggaaccccgcatacggtcccagaaggaccgccaggatgaggccgccgcccagatggccgctggagccggtgcccggaatggtgaaattcagcatctggcaggcaaagatgaaggctcccagcacgcccatgagcgggacgagccgcatttctttttcctgcctgaccttacgtgcgcagagcgttgtaattgcagcggaagccgcccacatggtgcagcctaccgccggtgagatgaagccgtccgccatatgcatgatgttgatgcctttctattgaatagtgtgaagtattgctgaaagccccgtaccgggcagattggcgccactttagcataaacgccgcaaagccgaagaaggaaatgcggcaacggaggaaagtatgttccttccgcttctcggttttggttcccgtgcggagccggtaaggcctgtttccggcaaaagagcctttccggagggggaacggaagggagggcgcgtttcttcgggtgcatccggcggcaattcatctgccgtcccgtgccgacaaagggtgtggacgggttgggcgtgatgcaggcgggaaaactgtctgctagacgggacccatgatgaatttttccatagccaggtgtttgttttccataggaggatgcacgacaatcctgggcaatatttccgcagacacggccgtgtcttccgccggagccatcggaggcctgggcgttctgacgattgccgtgaattacacgctgaatctgctcaaaaagaaggatgagcagttgatggcgaaggatgcccgcattgaagccctgatggaccgcctgattgacaaatgcccgaattgcgagctggcgaaagcagccaacaagtccctgctggatgatgaatgacggcaggcgcgggggactatctcccgtcagcgttcgccatgcgggtgtaaacctcccgggttccttccgtgttcagaatcagcgtgtttctgctgagactgtcaatggttgaggtagcggtgaagagggaggaattgccatttcccatgcttttccccgtcaggatcaggcggctgccgtccagctgccagccttggtagagaagcgtgtgcatgttgatggaaacggccctgccgtccggcaggagctgcattccctggacatgcccaggctgcccggggacgggctggatccaggagccggagaggctggcgggagtgggctgcatggagcaggatgccgccagcaggaacagggccgggagaaagagggaaaatttcacggcgagggagttcagcgttgttcccggatgatttccgtgccgatgccgtccggagtgaaaatttccagcagcagggtgtggggaaggcgtccgtcaatgaagtgcactttgcgcacacccgcgttcagggcgtcaatggcggagtggattttaggtatcatgccgccggatacggtgccgtccttgataaggtcgagggcttccgtacgcgtgacggatttgatgagggtggagggatccgaagggtctttcatgattccggggacatcggaaatatagatgagtttcaccggcttgagttccttggcaagggcggcggctgccaggtctgcgttcacattgagcggtttatgggtgcccagttcttttgccagcggagagacgatgggggtgatctggagttccagcgcttccgtgatgcgctccgtcaggcaaccgatgacgttgcccacttcaccgatatctatggggttgccctgttcatctttttcatggatgcgttccccaacgaagatttccgtgccgggaatgcctacgcccttgccgccgtagtcgcggaacatttgaaccagaccgggattgatggttccggaaagggtgcgttccacaatggaaatggcttccggagtcgtgacgcgaagcccgttgacgaaacgggcttccagccctgcctccgccatcgccttggaaatggctttgcccccgccgtggacaatcacggggttgaagcccaggacttccagcagaacgatgtcccgcatgagctttttgaccaggcgggcgtcatccatggcgctgccgccgaatttgatgaggaatgttttgtcccggtaggcctggaggtaggggagggcgccgacaatgacggaggcctgttcaatcaggcgggtgattttggagtccatgtcagtaatgaaacggtaggagttttaacgaaaggagagggagattttgaggcaggacccgttcaaagcaggcgcctgcttctgaagtaaaccaggggcaggatgatggaaacgagcatgactaccagggagatgtagtagccgtattcgttttccaggccgggcatgtgggcgaagttcatcccgtaaatgctggcaattaacgtggggggcatgaagaccacggccgccacggtgaagattttaacgatttcgttctgttcgatgttgatgagtcccagaacggcgtccagcatgaagttgacgttgctggaaaggaagttggcgtattcggaaagggaagtgacgtcccggctcagaggacgcagcttgatgtacagcgtggagttggtgtcgtccaaggcctcttcgttgctggcgtacgtgagcaggcgcagaaggttgaccaggcagtcccgctggcgggtgagcaggtcgcccacgcggcccaagtcctggagcgtcaggcgcagggcgctggagacgggcacccgcttgctggtcttgccttcaggttcgtccctgcggaagatgtttttggaaaggcggtccagttccgcgccgaaacgttccagcacgtccgcctggcggtccacgatggtttccagcaggccggtgaaaacctggtcccggctgatttgcttctggcgcaggagctggtgggaaaaaacgcggaaggaataggagtccgaatggcggatggtgatgattttcgcccccatgaggacgaaggtgatttccgacagagagggggattccgtatccacgcggctgagaactgtggtggtcatgaagcgcgctccgtcctccgtgtacagacggctggtggcctcaatctccctcatttcgtcataggtcggcatttccagcccgcagaggcgttccacaaacttgatttccgccggttccggggtaaggaggtcaatccagaagacggaatccaagtgttgttccgccgcatccacctgggtggtgcgctcaatgccttccggggtttgacgatagagccggatcatgccgttgatttcggtggggggatggaacgatgccgtgcatgaggttgagtgacacccaacgcagacatgatgccttgtttgttcagggaagggaagtaaaaagggtgacaaaaagaggcccggttcccaaggtgggaaccgggcctgccggaaaagggatgcgcgcctcttaggcgttttccttgacgatcaccttgagcgtggcttccacctggggatgcaccttgatgacgacttcgtgttcgccttcgctcttgatcggcttttcgagttcaatcgcccggcggtccacttccacgccctgagcggtcagggcatcgtgaatgttctggttggtgatggcgccgaacgccttgccgccctggcccacttcaagggtgaggtctacggtcagtccgctgatcttggcggccacttcctgagcggcgctgagttcttccgcttcgcgcttggcgcgggcggcctgaagattggcgatgaaacggcggttggagactgttgcttcgtgggccagacccttggggatgaggtagttgcggccatagccagccttaacggtcaccaggtcggcttctgcgccgagcccttcaatttttgttgcgagaattacttccatcgttgccatggctaaaaagaaatggttatttgtgagcggttaaagtagtaagtattcgcccgaatgtcaagacaagagcgataaaaagggcgtttttttatgttttgggaggaaaaatcctcccggttgtcatgattggtgacattgcgcttgcttcacgcggcagtagtatgtagggaaaggaaccgcatttatcgcgttctctcccggaggggtggggttcgcccgcgggtacattacagatatttgatcttatggctattcagcgcgcattgatatccgtttccgacaagaccggcctggaggagtttgccaagggcctgcacgagtttggagtagagcttatttccactggcgggaccgccgctttcctgaaaggcctgggccttccggtgattgagatttccgactataccggagaaccggagttatttgaagggcgcctgaagacgcttcatcccatggtgcacgggggcctgctgcaccgccgcgacaatgaggagcatgtgcgccaggctaaggaaaacggcatcaagcccatcgacctggtctgcgtgaatctgtatccttttgaagaaaccgtcgccaggcccggagtcacgctggaggaagctattgaaaaaatagatatcggcgggccgtccatgctccgttccgccgccaagaattacgcttccgtcacggtggtttcggatcccgcggattacgcgcgcattctggatgaaatgcagacccacaagggggatacgaccctgaagacccgtgaaaacctggcggtgaaggtgtttatgcgcacctccaattacgataacgccatcactaattatcttggccaccagagcgcggaaagcaccaagggcagcttctgcatctgcgctcccctgtatcaggaattgcgttacggggacaatccccaccaggaagccagcctgtacggcagcttcggggatattttccaccagcttcagggcaaggagctttcctatacgaacgtgctggacattgaaggggcagccgagctgattacccagttccgccgcccgacggtgggcattttgaagcacacgaatccctgcggcgtgggccaggacgacgaagacctgcgcaacgcatggcagaaggcttttgaaacggatacgcaggcccccttcggcggcgtgatcgtggtcaaccgcccgatgacggaaggcctggcccgtgtgctgagcgccattttcacggatgtcatcatcgctccggagtatgatgcggaagcccgcgccattctccagaagaagaaaaattgccgcatcatccgcatgaacacggaagcctggatgaaggcgcgccgcgaacccatcatccgttccgcgcccggcgggttcatgaccatgaagcgggatacggacgtgatggggctggacaatctggaagccaaggtggtgaccaagcgccccccgaccgaggaagaattgaccgccatgcgtttcaactggcgtgtcgtgaagcaggttcattccaacgccatcgtttttggcggtacggaccgcacgcttggcatcggcgccgggcagatgagccgtgtggattccgcccgcattgccgtctggaaggccgggcaggccggcctggatctgaagggcagcgttgtggcgtccgacgccatgttcccgtttgcagacggcctccaggtggcgattgacgccggagccaccgcctgcatccagcccggaggttccatccgcgacgaggaagtgattgccgccgctgacgccgcgggaattgccatggtatttacgggacaccgccatttcctccattaatttgaatgttcgtccccgcccctttgtcttaaaaccgatatgctgctaggtgtaaatatagaccacatcgccacgttgaggcaggcccgctacgcgaccatgctggattccttcaatgtggagccgagtgttttggacgccgcttatgcggcgcaaaggggcggggcggattccatcaccctccatgtccggggcgaccgccgccacatgcaggatgcggatgccctgagcgtccgggagagcgtggcccttcccctgaacctggaaatgggaaataccccggagatggtggattttgccctgcggctgaaaccggactatatctgcatggttccggagaagcgcgaggaaatcactacggaaggcggcctggacgccgtttttcatgaaaaggatctggctcccaccatggcaagaatggccgacaacggcattcaggtgagcctgttcattgatccggaagtgccccaggtggaggctgccgcccgcctgggcgcccccatgattgagttgcataccggatgttttgccaaccattccggcagggagcgcacggaggaactggcccgtttgaaacgcgccgcggaactggcccattccctgggcatccaggtgaatgcgggccatggcatcaattaccagaatctggaacagctgctggctggcgtcccttgcctgcatgagctgaacatcggccatacgattgtatcccgcgctctttttgtggggatggagcaggccgtgagggaaatgcgccaggcgatcgaccgcctgagctgattgcgccgtttcaattgatcccggttgccggagtatgagccgcattgcaggattgggaatggatttggcggatatggaacgcgtacgccaggccctgcggaaaaacggggaggcgtttgcgttgcgcatctgcacccctgatgagtgggcttattgccggaagcacgcggatcccgtgccgcatctggcggcgcgctttgcggccaaggaggccgtggcgaaagccctgggaacgggaatcggggcgaagtgcgcttttacggatgtggaggtggtgcgcggcgatgcgggagttccttccattcttttgcacggggctgcgggagtgaccgcccgggagctgggcattacgggctggttcctgaccatgacccattccaggttgagcgccgccgccaccgttattgccttggcgcaataaaaaagccgttccctgggaagaaaggaacggctggcattaaaggaggaaagggaagttattttctccttctgcgtgcggcaaatcccgcgaacgcaagcagagacaatgccgctgtggagggttccggaacagcggcataagagacggagagcgaactcagtttcgtgccgttcaagccgtcattattccaaccgggagcacgacgtccaatgctgtacatctcgttttgggtatctcctccgtccgcggttccggtgtaccagtcgatatcgctgatagaaacggttgcggtgctggcggcagtaccattatcaagagtaacggttacgtcatgtcccaggatatcaacggttacgtttgtccacgtatttgccgtcagtccggcttctgcgattgctcctccggaggagagattgccggagttgatggcaacagccccattgctgagtcccaggctgaagccgaatccgctgcgggcaacgtgaatgatattttcaagggaattgttgcctccccatgagatgtccatggtgatgctcatggtcccctccccggaaagggctccgttcagcatttcccggaatacatttgtaccgcgttcgtcaaaggtggaaccggtaagaaccgtccccttctctgcatcttgggcagtattgaaattacctgtagcagttccccccatgacggcagccgcggaggaaaaatcccatgtataggtagctgtctccgccgcctttgccgcaccacagaaaagcagccctgctgccagcggcaaatattttttaatggatagattgataaccatatgacaatagcacgtaattgcaaaaagattcaacgattttcaaattcgttgaatgtttttctatcttaacccattgataaataggtttttgaaaatatctctattacaagattggtttcttttttcgtttgtttattttcactgttccatacagaaaacgagaaaattatagatttttttcttgtaaaacggatttgaaattcgttgctatggaataaaagaggccgccctgtcaaagggcggcctctgccttaagagttttttcttaagtcaggtggacttttaagaaaagctcttgatgagaagctggcgctgttcttccagttcgaccgggagctttttgcccaccttgtcgaacagctcggtctggctttccagttcagcctgccattcgctcgggttgagagccatgttggcgttgaactgttcttcgctgtagtcgaggcccgtcttatccagttcggcataggtcggggagacgcccagcacggtcttctggccttcagccttgcccttggcgcggcgcagaatccagtcgagaacgcgcatgttgtcgccgtagcccggccagatgaagttgccgtccttgtccttgcggaaccagttcacgttgaagatcagcggaggattggcaacggttttgcccatgtccagccagtgctgccagtagtcgcccacatggtagccgatgaagggaagcatggccatcgggtcgcggcggacctgaccgatgttgccgaaggcggcggcggtcatttccgaacccatcgtcgcaccgacgtaaacgccgtgcgtccagtcgcgggactggaagacgaggggcatggtggtggcgcggcggccgccgaacaggatcgcggaaagggaaacgccttccgggttctgccattcgggatcaatcgtcgggcactgggaggcgggggcggtgaaacgggcgttcggatgagcgcacttgcgtccgcaatccggggtccagtcattgccctgccagtcgatggcgtgggcgggagcggggccgtccatgccttcccaccagacgtcgccgtcgtcggtcagaccgacgttggtgaagatgacgttttccttgatggtgtccatggcgatcgggttcgtcttgtaggacgtgccgggagccacgccgaagtagccgttttccgggttgatggcatggaaggtgccgtcttcatggggccagatccaggcgatgtcgtcaccgatgatggaggttttccagccggcttcccggtaggaggcgggggggacgagcatggccaggttggtcttgccgcaggcggacgggaatgcgccgccgacgtaggccttggtgccgtccggggattcaatgcccagaaggagcatgtgttcagccatccacttgttcttgcgggcgatggcggaggcgatgcgcagggccaggcactttttgccgagcagggcgttgccgccgtaaccggaaccgaaggaccagatttcttccgtttccgggaagtggcagatgtacttttcttcgttgcagggccacggcacgtcaacctggccgtccgcaagcggagcgcccacggtgtggaggcagggaacgaatgtcccgtaaccgtcacgcttcgggttgccgccgcccttgacttcgtcttccaggcgcttgagaacctgttcacccatcttggtcatgatgcgcatgttggtcacgacataaggagagtccgtgatttcaatgccgattttggccaggggggagtccagggggcccatgcagaagggaatcacgtacatggtacggcccttcatgcagccattgaagaggcccttcagtttggccttcatttcaacgggatcagcccagtggttggtcgggccggcgtcttcttccttctcgctgcagatgaacgtgcggtcttccacacgggctacatcggagggggtggaacgggcgaggaagcacccggggcgcttctcggggttcagtttgataaaggtgcccttttctaccatcatgttgcaaagctcgtcattttcttcctgagagccgttgcaccagtagatggagtcgggttggcaaagctgggcgatttcttcgacccacttcttagctgcttcgtgagtggtactcatggtgaagatagtgtatgcacggaaatagccgttggcaagcctcccgtgcggctttttatggggcggttttgtttctccgggcatgaaaaccgcatgcggggaaaggcgttgccctgattgccggatggctgtgcgcgggggctttcttcaggatatccctttttcctgctgccgtgtttcggaaagggtgaaaaagactgttttgactggaaatctgcttgccagctcgtctgcgatagtctagggaagaatcatgaatgttagaatgttgtcggcaaatgcggtgtttctgatgctgccggctttgctggcggcgtgttcggacgccccgcgcccgcccgccgtcagcttcaggattcagaatgtgcctcccgtgccgcgcacgatggcccagatgtccagagaggtgcacattaaccgtgatttcatgtccccgcgctcccgtgctcgccgggccgcccattccatgcatccgaggtttatcacgattcacagcacagccaataccaggggtgacgccgcggcgcatgcccgggcattgaaaaggggggccatggggtccctgaactggcattttacggtggaccagtaccgtgccgtccagcatattccgctgaatgagacgggccgccacgcagaccggggcggccccggagacatgtactccatcggcattgagatgggggaggtaaggagccataaccccattgttacctggaaccgctccgccaagctgacggcagtgttgatgaagcagtaccatattccgctccgtaatgtggttccccattattattggacggggaagaattgcccggccccgctgctgaccaacggccgtccgggacataaatggagctggttcatttcccgcgtggattattacaggcgctgtttggagacacggcccgccgcagcgctctgacgggtacgcgcacatggtgcatgataagggatacgttcttgggttcatggctggagaattgcttttaacgtcttctctggaggaatgcgtttttatccgtcccagagagttggcggccatgcaggcggcgggaatggcctccgtacgggatttgttgttcatgcttccgcgcaggtatgaggaccgccgcatgtttgaccgctatgattccctgtcttccggtgtgcccgtctgcctgagagggagggtggtggatgtgggctggaaaggctggggcggacggggcggcaagggccgcggccggtatgtggaagccgtgctggcggatgagcagtctttggggcaggcccgtttttcctgcctgtggttcagcatgccgggcgtagccaggatgctgtgcgccgggcaggagatgattgtgtacgggcgcatgaaaccgtatgggaaaaagctcagcatggtgcatccggattttgaaattatccgggaaggagatgagcagtccattcatttgaaccgcattgttcccgtgtatggcggccgcatggggattgcggtccgcaggctgcgggaaatcgtatgggagacgctgtccaggctttccccggctccggaaccggaggtgtatgagtttgtgccggacactccgtgcaaaacggcattgagggatcttcattttcctgagaccgcagaggcccgggaccgggcgcggcgccgttttgcgttggaggaatgccttgctcagcagttgaacgtggcctacagaagaaggcgggcggatgaaatgcccggcatgcggaccgcaggttccagccatttggtgaaggatctggcggattccctgccgtttgagctgacggaggctcagaagcgctgcgtgagggagatttaccgggatatgaaagccccccgttccatgaaccgcctgcttcagggggatgtcgggtccggaaagacgctggtggctctgtgcgccatgctgctggctgtggaacacggttattccgccgtgatgatggcgcccacgcagattctggcggaacagcattatttgaagttccggcagatgctggacaagctggatgtgcctgtttccctggtgacggcggacaggaaggaagaatcccatgtgtcgttcgggaagcagggcgggattgtggttggcacgcatgccctgctgtacgggaaaaatgtgccggagcgtgtggggctggtcgtgattgacgaacagcacaaattcggcgtgaatcagcgggagaagctgattgaccgggaagagcgccccgacgtgctggtgatgaccgctacccctatcccccgcacgctgacgctgactttttacggggagcttgacgtttccatcctggacggcgtgcccggggggcgcggggcggtcgtaacagccatccgtacggagaaggataagggaaaagtgctggcattcgttcggaaccagctggaggaagggaggcagatttacgtggtttcccccctgattgacggagaggattcccggaaggggaaagccgtgacgaaggaatgggacgagtggaaggctctgctgcctcatgtggatgtggggctgctgcacggcaggatgtcttcagaggaaaaagaggcggtgatgaaggatttccgctccaaccgcatcagcgtgctggtgtccaccacggtggtggaggtgggggtggatgttccgaatgccacggtgatgatcatcaataatgcggaaagtttcgggctttcccagcttcatcagctccgggggcgcatcggccgcgggtcgcacaagtcctactgcattttgatgacggacgcccgtccggaggatgagcaatgggagaagctgcgcatcgtggaaactacggcgaatggatttgacctggcggaacaggatttgaggctacgcggccctggagacgtgctgggtacgtcccagagcggcttgaagggagtacgttttgaggaatggctgctggatgcgcgcctgattcaccgcgggcggcagctggcggaggctattctggcggaagatcccaatctggaatccgccaaataccgccctctccgttttttgctggaagacggggcggggaggcgtgtggccgggtaagattgtttttctgccgtttgctgacggtcagcttgtaagaggcgcatgacagataagagggcaacgatttatccgccggaatgaatctaaagaagcaaagaagatgtttcttcttcaacccgaacaccgataaaacaatgattcagacgtatcaagtactccctgtggtggccatcgtatgctccgcttccgcctttgcccagaacgctgccgatcccgtgcagatggtcaagcagaatatcgacctgatttcttccgccaacaaggttttggacgacgtgaaggacaacgctgcggttgaaatcgccattaagcagctcaatgcgttgacccagcaggccaagcagctggacaagtccatggaaaagatgaagcttacttccgagcaggctatccgcatcaccaaattgaacggagacgcccaggacaccatcgtggacatgctggaaaattgcgagcgcattcaaaaggacaagctgatgactccggctctgctcaaggcggtgaatgattttgccgacgccgccaacatcgacgtggtggaaacgattacgaccgtggagcaaattgtggaagattgagtgaccagcttatcaaaagacctttgactggtaaggccgcctcctgaagaaggcggccttattttttcaggaagggccgttttttatcaatttccgggcagggcattttatttctccatggccggattggggtttcttgccggaaccaggtagcccgtgccgggagacgtgcccaggcaggagaggagatcctggtggcgcggcagggacttggcacggaaaacggctgcggcggggtctagcacattgccgaaggtgatggctcccatcgggcatgcgagctggcaggccgtttgagccgccccgtccggaagcagcatgtcctgggccgtcacatggatggaggtggatggctggcccggatgctccttcatcaagcgggatttgtgccggattttggcacgttccaccatttggacgcagtaggtgcatttttccatgacgccgcgggagcgaacggttacattgggattgcgctgaaggcgcgtggcctgttccgatgctttggcgtaatcaaaaaaattgaagcgacgagccttgtacgggcagttggtggcgcagtaccgggtaccccagcaccgggcgtacaccatggcgttcaggccttccgtagtatgcacggtggcattgacggggcatacggattcgcatggggccttgccgcactgctggcaggccacggggatggaggtgagcgtccctttctccgtgaagtacctgtcgatgcgtatccagtccagggcgcggcccctggccatctggtcacgccccaccacgggaatgttattttccgcgcggcatgcaatcatgcaggcgttgcagccgatgcaacgggacgtgtcaatggccattttccactggtaaacggcatccgcgccgggagggggaggcgggacgcgggacggaccgggatgcagggagaacggggcaggctgcacaacggggctttgaatggcttccgtccgctcccggagggcagacaaggcaatctgttccggggcaatgccgtatgcttccgttttttccacctgtctgcggagttcatatccgccggaattttcctgcctttccgctacgtggttgatgccgccataacccagaggaagaataatgagattatccgccactcccggaatggggcacaggatgacttccatttgcgtggagggggcggtaagcgtgcagtgcatgggcctggaatccgaacctcccagccgcagaaaggtggcgggggaaacctgtgcggacgccgcccagctgacgcctgttattgggtccgggcattcctgcatccatgcattgcgtttccagcgtccgtccccaatggaatagtccgcgcggaattgcaattccagcatcccggttcccaattttttcccgtggctgccaaaaggcgctgcgggcgtttgcatcatggctgttccaagagccgtttcttcctgcggggacaggggggcataggccgtttcttccgaatagccgcgctgaagcgcctgagcccaggccgcagttttattttccggattcacggcgcgttcaaagcatttgcgcgctctgtggtaaacgggagagaggtgggtgggggaattgtccgccgtggagagatggcctttggaggaaagcaggccggaaagcacttcttccggagaaatgcccccgtacaggggaagaatgacgggctggcgatagcaaaatctgccccggtaatcccgctccactccccatgattccagaaagtgggctgccggcaggtgccaacggcagacgcgggaggtttcatcttcatacattccaaggtggatgctttccaccctgttcagggcttccgacagtccggaactgtacccggaatccagcacgggatttcccgcatccagtaaaaaaacgatttccacctttttcccccggatgtcccgaacaagatcgtccagcgtgccataaggggttgggcgcggagcctttaacaactggatgcatgtccccatggagccgagaagacagttgagcttccagacaatgccggataattccggatgattgtcccccaggaggacaacgctttctccggggtggctgaataagtcatccgcacagtggcgaagccagttgagttccccttccgtcaggggatggtccgttcgccggggaggggaaagcgtttggccggagttttttttgctggaaagatagcggaacagttcctccaggaaaaacgccaggcgtgcgggaggaacgggcagcctgtggtcggcatgggccccggtcagggaaacgcgtccctccacggcgtaaaggcgtgttcggttcctgttttcttctttgtagtaaagcccttccggggagcgggacgcaatgaagtcgcgcgtgtttccataggggttttgatgaagaaaatcgcaatccagggagaggatgcgtctggcgcgcgcaaaacgcacgcggaaccgtacttcttccggcagccccgcctgcatgccggaacccggttcaggcacgggggaataccggtagatgcgcacgagtgaatttttcctggtgatttcctccagcatggaatggagcagaggggaagccgaagggggaaggagaaggccgatgccgccaccatcccgaagattgcgggaccaggaagaaaaggctccccggaattcgtcttcggaggccggattgccgttgaacaggatatgtttgctgcggccggggtcgtaaaggtccagaatggaggcctgagccgcagccggcagccccggaccttccgggtattgcagggagggaatcaatttgacggggcgcccttcataacaggcggccagtacgggttgcgcgtttcctgccatggtcaggcaggtggcgtaagccgtttccacgccgggaacagaccattcaggcccttcgttatagggaaccaggtatttttccacacggcggcaggccggcagccctatccctgccagggctgcccctgcacccatccatttcatgaaggaacgccgcgtcatcccccgttcttcttccggaagaaaagcggggtggttttggggaatttcattctgggaaagtggagggtggggagtcaaaccgggtaatgatggggattgatgaaacagggatggctttttttaggaaatccgaaggatgaaatcaagtggtgattgacggcggtctttatctccgggccaataacggataaacagggaacaggaggaaatctttcttgtggaattcaatgtcattgattacggattcaaggaaggaatcatttaatgaaaagtcctttggtctttttattacgcagtatccgggaacgcagggaggaataactttggcgccgcggatgtcaaacaggccatggaggtcagtgatggcatgcggtgcaatccgtcttcggttgaattttccattggcgtttcagaaaatttcccagttgaagcggggtttggatgcttttcccttcttcatcccggatggaatgcgtgcggaggtagtctgcggcggaataacgggaactggccgtttcctccagcgggcgcagatggggagccggattgcggtggcagtccagacaccattgcatgcgggcatcgcgtggagccctgatgcgttccatgcccgccacgtctccatggcaggacgtgcagccgataccccggttcaggtgggccatgtggttaaaataggcgtgaccggacaggcggttgaccatcacccagcggaccggttctcctgtgtaaccggggtattgcgggtccgccgcctccctcaggggggcgatgagcgggctgtccggaagaatatgctggtggcagcccagacaggacttcgtatccggaatgccggctctggatgagcgctgtgcggcgctgtggcaagccgtgcagctcatcttcagatctccggcgtgaagtttgtgggaaaagcggacgggctgcacgggttcatactccggaatgctgaaattaacataatatattccccccagtacgaacgcggcagcgagcgcaaccagggcggcaatcccgtaaaagcgcttgttggtattgggtggaaagatgttggccatgaaccgtagagagaaagggatgcagcctccgtcaggccgttctgcccgggcgcgggatgcgggcgggcggcaggggcgtatccatcgtcaggtcttcaggcaccagccgtgcggtgcttttcttaatctgttcccaggtaatgcgctggcctgtgtgggccgcttcacgccccatgatggcagccagggtcttattggctgcgctttccagtgtctgggtccaggtgccggagcgcaggaaacggtaaaaggccacatgcgtgtctgcgtacatattgccgcgttccccgcggaaacgccagcggttattcgcctgaatgtagggacggtagggagtaaccagcattcctttttcgcagatggtgcggtccacgatttccccgtggcagccaacccactgtctgcatgaaatgtgggccgttacgttgtggccgtactcaaaataaacgtcgtaatgatcccatacgtcgccgtcatcccggcgctgggcgcgtcctccggagccgaaagccgccagaggaagctgctcgttcatggaccagaccatgccgtcaatcgtatggacgatttgttccacaaactggcctccgctcagccagttccatgcggtccagttgcgtagcgcccatgccacgtccgtatcggaggaaggtcgggaatccagggccagcggagacttgggaggagtggtgtaatataacccgtcaaaggagaggacacggcccagctgcccggaggaaagcttgcggtgggcttcctcattcgccttgtcgtagcgccagcagaagccgtccagaatcaccagatttttgagttttgccagccgtgcggattccagtacggaaagcacgccgggaacgtccactgccacaggtttttccgcataaatatgtttgctggcgtcaacggccgccgctaaatgttccggacggaaagcggggggagtgcagagcagaactacgtcaatatccgtttgcagcagtctcttgtaactgtccaggccgctgaacaggcggctcctgtccagccgggctcggttgccgtactgttccgccagcaatttggcaccgaaatcgatacgttcctgaaacacgtctgccaatgcccaggcaattgttccgggatcggcgtccagagcgtttttcatggcgcccaggcctcggcctccgcagcctaccaggcccaccttgagcggttttgcgttcgtcagggcctcttctgcgttcaggcagggcatgaaggccaggaatccggctgttcctgcggcggttttcaaaaaacggcgtctgttccaaatagggtaacccatctcaggggaattatacggtgacgtcctgtgaaatcaaacgtcgtattgaaatggtgacacaaaaaataggcgcaaccgtcattctcggaaatggtgccttgcggagggagtcaatgaactccctatattttgcctattaaatgggaagggctgtttcctgcgttcagaacgagaggcagaggttaaagagatatgttgcctgaaaaacagtttttaaggataaaaactgatttgactccggaatcttcagtgttcatgatgaattcaatgaggcctccggcttttcaaccaatcatcatgatgaagcgaaatctcattccttctacggcttttttggcggcgttagtgtttgttgcctgtgacggcggcaagaagcaggatcatccccgggatgtttcggttcccagcgaacaggccgttcctaaaactccgggagaaaaaattctggccgttctgctgcttattcaggatcaggctacggcaaacgcccacgcggcggaggtgaaagagctggctgcctccctgcccggggatattcccaatgaagaagccgtaaatattgcaaatgaattgatgcgtctggccagccgggaatgttatggttcttcgtctctggaagatgctttgaaaggaattcatttcgataccggggaatacacgggcagtgtgcctctggatgtggatggatttgaacctaccgcggaagagccgtaaaaataaattccccgtgccgggaattgggtaattactccaatgttcctctccattccgttttgccggaatgaagggtggtttgatatggtatcaggtcccccggtaaatcctttcctcttcctgatgggaaaatgcgcgaagagaaggggaaaatatctgtacagcccgactcccggagttttcttgctagagaacaaagggccacgggtggtaaactcaatccagggggcggcgcaattcttcaatggcttccgccatatcttcccgagtaattttcgtagaaatgcctgcctcccctgctttggaaagcagaacaaagcggatggttccggcccggaactttttgtctgatgccgttttttgaagaacagttgccgtatcaatgccgtccggaagaaccaagggaagttccagcgcctgaagcgtgcgaaggatcttgttggcatcggaagaacttaaaccggctttccgttcactcagaaacagggcggcgcgcatgccgagcgccactgcttccccgtgaaggatggttccgtaagggacggcagcttcaatgccgtggccgatggtgtggccgaaattgagcagagcccggatatccagagtttccaattcatcattttctacaatgcgggccttaatggccacgttccgggagattaggtcaggaagcctggcaatagtattcagggagaagccgatggagagttccggccccagccctttcaattcatgaagcatggaagcgtctttgatagctgcgtgcttgacggcttccgccaaaccttccgccagcgtacgtcgatccaaagtcaccagcgtggtagggtcgattaccacgacggacggctgatgaaaggctcctacaagatttttcccttctggaatattgacggcagtctttcctcctacggaactgtccacctgggcgaccaccgttgttggaatttgcatgaaggggatgccccggtaataaatggaagcgatgaagccggccagatcccctactacgccgccgcccagagcggcgatgcatccggtgcggtcaagcccggcccggaccagttcggaacacagctcctgggcctgaagcatatttttggaagcttccccggcattcactacgtgcaggctgggcatgaatcccgcgctctccagggacttcattacgcgctctgcataaagtggggcgacgcagctgtccgtgataaccgcaatcttgccgtccagaccggcgcggtaggcaaactctccggtacggtccagtgctccgttttccacgtggatgtcgtaggaacgttcaccgagagcaagagaaatggtaggcatgaggccagtatgggatattccggagggaacctcaaacggaaagtgcggatgaggcgaagaagacgcattctccttttaatgcgttcttgtcctgggtgccagcggagaaagagtttccaggataactttcaaatgctccgcgcgtgaggccgtgaacccgccgtcatccttccagatgatattgccgttgccgtccagaaggacaatcgctgtttccgccttcttgtgaagggaaagtctgcggcgtacaaaagactggtcataataggaaatcagggaattggtcttcatgtaaaaatccggaaaatcccccagagcctgtgtaaaggcggggacatcaccttcaatggggggtggctgcagaaccagcaaaatgctatattccaccggggttggcgtatgtttgtactgtttgcggaggtcctcgcagaagggaagccactttttcattccgtacaaagtttccgggtgaaaaacagtcagcatgatatggaaactttttggaacgataggaggcagggaaatattgtctcccagtaaattcatgccgttgatatccggaaaacggtaacgtccgtttcctcctccataaggatgctcgggattgggcgttggcaagtgtatttcctgattcttcatgctctgttagacaaaattcgaagaaataatgttcatgtcgatggttgccgaacagggtatgttcattggtgcggggaagggccttttttatgttggaaggctctctttctctgaaaattccggccgattagaaaatcggtattcatggaaaggggaatatataggcctgttataggtttttctcgaagaaaggtggggtacaagagcagggaagagagggacgttcaaaaaaagatgcggtggaaagaggcagtatgacaaaagcatatactgttcatgatatgtaggttatgtgcgtattgagggggtggcgggaataagcggacgcaaaaaagaggacgaaaaaaattgacaaaaaggtgtggtatgatagatttctcggcacgccaacacggcgacgggatgaaaagcccggcggctgaagggctcggaagagtgctggaagcggctggagccggccacccggagaaacccccggaaggggttgcgataagaagatttcaagggaatgactaccgaaaccgccgagggttttccgagggtgccgagaggtgcctgaggggtaaaagcccgaaggagcgacctagctctgagaggggtggtttggtagaagcaaggggaaagaaaaaaggtcgtgacgcgcgccgtgcgaggcagagcgaagaggccttcaagagacacaacttgaaggaagagctggctgaagcatggcgcaaatgaaatcgcaagattccatttggtccagcaatttcaaaaattaatttgatggagagtttgattctggctcagaacgaacgctggcggcgtggataagacatgcaagtcgaacgagagaattgctagcttgctaataattctctagtggcgcacgggtgagtaacacgtgagtaacctgcccccgagagcgggatagccctgggaaactgggattaataccgcatagtatcgaaagattaaagcagcaatgcgcttggggatgggctcgcggcctattagttagttggtgaggtaacggctcaccaaggcgatgacgggtagccggtctgagaggatgtccggccacactggaactgagacacggtccagacacctacgggtggcagcagtcgagaatcattcacaatgggggaaaccctgatggtgcgacgccgcgtgggggaatgaaggtcttcggattgtaaacccctgtcatgtgggagcaaattaaaaagatagtaccacaagaggaagagacggctaactctgtgccagcagccgcggtaatacagaggtctcaagcgttgttcggaatcactgggcgtaaagcgtgcgtaggctgtttcgtaagtcgtgtgtgaaaggcgcgggctcaacccgcggacggcacatgatactgcgagactagagtaatggagggggaaccggaattctcggtgtagcagtgaaatgcgtagatatcgagaggaacactcgtggcgaaggcgggttcctggacattaactgacgctgaggcacgaaggccaggggagcgaaagggattagatacccctgtagtcctggcagtaaacggtgcacgcttggtgtgcggggaatcgaccccctgcgtgccggagctaacgcgttaagcgtgccgcctggggagtacggtcgcaagattaaaactcaaagaaattgacggggacccgcacaagcggtggagtatgtggcttaattcgatgcaacgcgaagaaccttacctgggcttgacatgtaatgaacaacatgtgaaagcatgcgactcttcggaggcgttacacaggtgctgcatggccgtcgtcagctcgtgtcgtgagatgtttggttaagtccagcaacgagcgcaacccctgttgccagttaccagcacgtgaaggtggggactctggcgagactgcccagatcaactgggaggaaggtggggacgacgtcaggtcagtatggcccttatgcccagggctgcacacgtactacaatgcccagtacagagggggccgaagccgcgaggcggaggaaatcctaaaaactgggcccagttcggactgtaggctgcaacccgcctacacgaagccggaatcgctagtaatggcgcatcagctacggcgccgtgaatacgttcccgggtcttgtacacaccgcccgtcacatcatggaagccggtcgcacccgaagtatctgaagccaaccgcaaggaggcagggtcctaaggtgagactggtaactgggatgaagtcgtaacaaggtagccgtaggggaacctgcggctggatcacctcctttctatggagcaagtgcacggaagtgcacaggtcggatctcttcccgaggggagagaaagcggaacccgcgagggcccgcaacgaaccaaagatgtgtaaacagccagacgcctggagcgaaacctggcacgacgtgcgtgacgaccttttttcaccgagaaccgcaactgggggtatagctcagttggtagagcgccagctttgcaagctggatgtccggggttcgagtccccgtgcctccaccagtttcgggaaagagacccaaagccgggcctgtagctcagttggttagagcacgcgcttgataagcgcggggtcacaggttcaagtcctgtcaggcccaccaacaaaatcgattattgagggaaagcgaaaattgacatctgcgtggcaaagaaaacgattgctgagaagcaatcgctttccaacaaagtgggtagttgaacaacaactacaaaacacaagataaacatgcataccaagcaatgagacaatacagtaagtcacgaaagggctttgtggtattgtggaagtggtaacagcttttgcaatatgatgaagtaagtaagggcgtacggtgaatgccttggtgccaacaggcgaagaaggacgcggcaagctgcgaaaagcctcgggaagctgcaagcaagcgatgatccggggatatccgaatggggtaacctgatcgaggcaatactcgatcgttcatacctgaatacatagggtatgaaacgcgaaacccgctgaagtgaaacatctcagtaagcggaggaaaagaaagagaaatcgattccgtaagtagtggcgagcgaaagcggatggagcccaaaccgaaggtattccttcggggttgtaggaccacgtcatattcgaccatactggatagtagaacagcctggaaaggctggccggagaaggtgaaagccctgtagacgaaatccagagtgggaattagtggtatcctgagtaatacatcacacgtggaacgatgtatgaacccgcgcggaccaccgcgcaaggctaaatactagttggcgaccgatagtgaacaagtaccgcgagggaaaggtgaaaagaaccgctgtgagcggagtgaaatagaacctgaaaccgtatgtctacaaagtgtcagagcagagcaatctgcgatggcgtgccttttgtttaatgagtctgcgagtcagtgtttgtggcaagactaagggcttccggcccggagtcgcagcgaaagcaagtccgaacagggcgcaataagtcgcaggtactggacccgaagcggaggtgacctacccttggccaggttgaagcatgggtaaaaccatgtggaggaccgaacaggtgaacgttgaaaagttctctgatgagctgagggtaggagtgaaaggctaatcaaaccccgtgatagctggttctcttcgaaatgcatttaggtgcagcgtcacgtgctgatgcgcgggggtagagcactgacaaggctagggggcacacccgcttaccaaaccttatcaaactccgaataccgtgcaatggaacgtggcagtgagacagtgggggataagcttcattgtcgagagggaaacaacccagatcagcagctaaggtgcctaaataacgctcagtggaaaggatgtgggattacacagacagtgaggatgttggcttagaagcagccaccatttaaaaaatgcgtaatagcttactcatcgagtgatcctgcgccgaaaatgattggcgatcaagcgttataccgaagctctggactttgccgcaaggcagagtggtagaagagcgttgcatgcgcgtcgaagggcgatggcgactgaccctggagcacatgcaagtgagtatgcagacatgagtaacgttaagccgggtgaaatccccggccgccgtaaacccgaggtttccagggcaacgtgtttcgtccctgggttagccgggacctaagccgaggccgagaggcgtaggcgatggacatcaggttaataatcctgagctcgcaacccttaaactggggggacgcatgagaaaagatgactaggttattgaattccgagttgagtccacggactcagcgcatcattggatcgagtgccaagaaaagccccagcgtatgctaagcgacccgtaccgcaaaccgacacaggtgggtgggtagaatataccaaggcgtaagagtgaaacctggttaaggaactcggcaaattagccccgtaacttcggaagaaggggtgcctgcagcgatgcaggccgcagagaaatggcccaaccgactgtttatcaaaaacacagcactctgcaaagacgcaagtcgaagtatagggtgtgacacgtgaccaatgccgaaagattaaggcaaggggttagccgcaaggcgaagctctaaacccaagtcccggtgaatgtcggccgtaactataacggtcctaaggtagcgaaattccttgtcgggtaagttccgacctgcacgaatcgtgaaacgagttgggcactgtctcaaccaggcgctcagtgaaattgtagtggcggtgaagatgccgcctacccgcagaaggacggaaagaccctatagaccttaactgtaagctgtcattgtttcttcggttttaatgctcagagtaagtgggagacgctgaagacgccctttagggggcgtccgagtcatcaatgagacaccaccctttgaaactggaggatctaaccctgagccgtgaatccggccagaggaccgtgtcagccggtcagttttactggggcggtatcctcccaaagagtaacggaggagcgcgaaggtgggctcagcccggttggcaaccgggtgtcgagtgcatgggcataagcccgcctaactgtgagaccaacaagtcgagcagatgcgaaagcaggcccaagtgatccggcggtagaaagtggaattgccgtcgctcaacggataaaaggtaccttagggataacaggctgatcacgcccaagagttcatatcgacggcgtggtttggcacctcgatgtcggctcgtcgcatcctggggctggagaaggtcccaagggtccggctgttcgccggttaaagcggcacgcgagctgggttcagaacgtcgcgagacagttcggtcctctatcctctgtgggcgttggaaaattgaggggttcagaccttagtacgagaggaccgggtctgacgcaccactggtgcatcggttgtactgtcaagtgcatggccgagtagctaagtgcggacgggataagcgctgaaagcatctaagcgccaagcccttcccaagatgagttttccctacaggttcgtggaagaccaccacgttgataggtcgcaggtgtaagtgcagcaatgtattgagccgagcgatactaattaccaattgacttcatcatattacatcactccccgtcgtgaatgacaacttgctcttgtctcatttacctgtgcatgttcatcaaccaccagccacgcagatgtcagtttacgctgaatccctccccacacaaaggacggaaatcttcttagccgccacacacataccctgaaaaaaatccctcactcagaagcccccaaaaaagcagggctcccgggcaggcaggatgaagaaaaaatcacctcttccccctgaagcccggtggccagagcgcagtggtcccacccggtcccgttccgaacccggaagtgaaacgctgccgcgccaatggtagtcggacgacaggtcccgcaagagtaggtcgccgccgggatttttttccatcaggccccgccagtcacttgactcgcggggcctgttcttttcttgctcggtcccgttctcccccccctacattctcttagttagtttccttcttgtaagatgtcgtattttttgtatgtattagtgttactatgttttctcatgcttttgccgccggggcgcttcttggaactgccatttctccgcttgtttgtgtatctgccgcagaaagatcgcctgtggcggcggctgaagatgtagtggcgcgtgtaactccctcggcaaagggttctgtcttgttccacttaaatccggatcagggcaacaagatcactatttccggtattgccggaggtatccgggtggaggcgtcagatgtacgccgcttggtggcgggttatggatggtatttaaagaatatagccaaggtccatttttcgtggaacggaaatcggataacgcttccttcccctttgccggttcccgccagtccggttacggtagaaagcccgtggaatatcgtttttgcctataattactgcaccctttcttatacggcggctttttgggattggaacagatggcagcgggagattgattttctggcgttgaatgggtttacgcatgcgctggtaacggcgggtttggaaaagacatgggaagattttctgacaggcttggggtatccccgggaaaaagctcttcgttttatccctaatccggcatttgccgcgtggtggaatatgggaaatctggaaggccacggtggtccgctgagccagcaacagataaataaaatggcccagatgggaaggcgcattgtctcccgtatggaacagttggggatgacacctgtacttcaggggtatgtgggatttgttccttctgactttcaggaaaatgtccggatagacggattgaagcttattcctcagggggaatgggttaatttcaggaggccgtgggtggtggatcccacttgtgaggcttttcccaaactggccgcagactggtacaaggctctccgcaaggtatacggcattcccggaaagatgtttggcggggatttgtttcatgagggggggcggaagggggatattgacgtaacgcaggcggcacaggaagtgcagaaagccatgcaaaaggcttctccgggggctttctgggtgattcaggcctggggtggaaatcctacccgagagttgttgtccgggttggatccggagcgtgcgcttgtattgcagcttaccaaggatatggctaacgggggaaagaatttaaggacttttaatggtattccgtgggtctggtgcgaactggcgaactttggaggcaatacgggaatgtacgggggggttccccttctgtcccggcttggaagtgagttgtccggctataaggataaggggctggtgggcatgggaactttgtccgaagggcttgagacgaaccccctgcattacgccctgttcagcgaccgtttgtggactagggaggatatttctgtccgggagtggcttggaaagtacgcgcgccagcgttacggtttcgcaccaaaggctgtcgtgaaggcgttggaagttctgtcttcctccatctataaccccgttcgttctcaggaagggtgtacggagtctattatttgcgcccgcccgtcctggaatgttcgaaaggcatccacatggtccagcggggagcgatattatcacctgggcgatattgtaaaggcggcgcgcggttatctgaaggccgcgaatgatcagccgaatttggtgaaaaaggagacgtttcgttatgatttggtggatgttgtgcgtcaggctcttgcggacgctgctttttaccagcttcaacaggtcaggagtgcttttgattccggagatttggctgcgtacaggaagcaggtaaagcgtttcctgtctctgatttcagatatggatgcccttttggcgacggatagccagttcctattaggaacttggcagaaaagggctttggattggggtgattcccggcaggaaaaagccttgatggacaagtctgcgaagatgcttatcactacgtggattgatcaggttccccggtctctgaatgattattccaatcgtcagtgggccgggcttgtttccgatttttatttgcctcggtggaagaatttttttgaatttcagatggatgtcctgaccggaaagaagacgcgtgatgccgcccatgccgcatttatggataagatggttcgggatgaactggcctttgccggaaatgggaaaatatattctgtcaaaccagcgggggatactttggccgttgctaatcgtgtgatgaatacccaccgggaaatgttggacgccctgagtgcggaagaaaagcattcctcgggcagtccatgggaactccagcaaggttctccgttgcagtttgatgtgacggatcaggtgactgcttctggcacatatactgctactttccagtggaagaatggccccagcgccttgaaaatccattctgtcagattatacgagggtaacagggaggtggcttccgatgttcatgagggcagaactggcgtggaaaataaggataatatttacagactggaattgaagaagtacagaaccaaccttgattcctatatcctgaaggcagaagtaagcggtgtttctcagggcgcttccaaaggagaaatggtgttgaaaaaactggtggattgagaagtggacaggaagttgtgcagggatgggagaaaaggcggttatacgtgcaggcttttccatttgttccggaatcagtttgtttccctcgccgaaaaaaggaagaagggggggatttcccccctttcttccttgaaagatggcatggtgataaaatttatcggcggtggcgtaacaatagagcgctaagaccgaacagacccagcgtagcggttgccggttccggaaccacttcattacttgtggagaagtttactgccgacaaatacatgccctcccaagagttcaggatattgtttttataggtgccggttccgcagccgctatgcatgtccagagaaaggctgtttaaatagacggtttcgggaagtgttgcttcctttctattcgtggcggcggacataacggaagaagacgattgggtcgcagagccaaagtagttgttggcggtgttagtgttcgtggtggagaatatggtggctgcttgggcggttcccaacgataaaaaatggagataacagaaataatgggtttcatctttgggctggaaatataacttgatacaattgatatgcactgggaaaaaatctatcgaatttagaatcgttttttgaaaaacatgaaatatattgatgttataaagaaatattcaatttatttaaaattttagatggaaaacgattagtaatagtcttttttatctcattatcggtattatccgagaaaaaaatcatgacccaatggtaaataccggttctagattttctttactccggcacatagccaaaattccgtcctcagaaaactcctgtttcccgaagcggaatggtcagcctacacaagctattctcttttagaagtaaatattgacctcggattcgcaatccgtttgtcgatattcttattgtactgccccgatttatgctccggttccaaaagatgagctgtacaggatcttttgtagagatggattttttttgaatatagccttttcgttcagagggctgcctggtaaatgctgaacatcagaatggccattcccgtgagggctgcgcctgcaatgatgccggaggcggtggggactttatattcccgtgatttggccttgaaaagatggtccgcagcccagccgagcacagctcctgtaaagaaaaggaaggagtcgttccactggatggcccaggccaggccgaagccgatgggggtggggagccattttcctgtccggggaatatagcggggaataagcaccagaatgagtccgagaataccgcctgcaatgatggaaagcaccttgatgctgtgcaaatggctgaaccccatgcccagtgcttccgctgtggccgcccatgttctggctcccggagcattgaaagcctggagagcgttcgcatccggaaccatggagcggaaggccagcacggagacgagggttcccagaaaaattccggaaaactgggcgatgaattgtttgcgggggttagctcccagcaggtagcctactttgaggtctacgagcaggtctgccgaggaactggacgctcctgaagtgatattggccgccatcaggttggctgttacgtgcccgggtgcaatccctccgaagatgagctgtgtaacttttcccatggctccggtgggtgtaatattggcttctccggtgattcggcagacgaccagcgccaggaaaaaggatatgactaccgcgatgcagctcatccagtacggaacgttaaatgatgtatgagccagatagccgagagctcccagagagataagctggcctgtcagaaaccagctcatgggcgtttctattttttccacatctgtcagttttcgttttttactcagggaaaacatggcacccagggaagaaaaggaacgaacaatgcttttccattggaacaggaaagccacaatgctggcgacgaccatgcaggcggttcctccccacagggtccagcttacgctctcccgataacctgctcccgcgggaagcaatttctggctttccagccacggaacgtaaagagcccagcaaacggttcctccgatgaagaggctgagggatgttttcatgcctaccagagctcccgcacccacgaacatgagatcccatttgaagaagatagtacgctggtaccagttgccgaggatatgttgctggaccgttccaagccatcgttctcctcctgcagccatggcgatggcattagcggcggcgaaaagggcagaataaagaagggctttggcctgtcccgccgcctttttgccttcagaatagagaactttgagggtttccgccgtagcaatactgtctgggaaccttatttgttcaatgttgatcatctggcgtttcatcggaatggccatggtgacacccagtacggcaatgaaaaatatccaggcgaaggtagtgccaagaggcatgtgctgtcctgtcagcaggagcagggcggctacggcagaggtgagggttccccctgtagaatagcctgcagaactggcagcggactgcatgcatgtattttccagaatagtcatgggggatttggaaatgcccaggcgcacaaaggcgttccagagggcaaaagagataattcctgccgtcagagccaccccaaaggaccatcccattttgaggttggcgtacagattagtgagggaaaggatggagcctagaagcatgcctacgatgacggctctccaggtaagctgcttcattctgtctccggaacccagataaacttgatcgtaccattgctgttctacttcatccggagtaccttggaatccatccagaggcagcggtttttccaagcaggaggggagagggctggaagattggggggacgtagatgccatacagttcataatatagcatttgcgggcgtggtggaaaagtcgtatctgtttttctctgctttcggcgttccttctgcttgagacttgcgtgcttgtgacggccgtggtttaatgggcggcatgagccaatcttttacggataaacttgccgcccgcattaaagagaccggttccgccttgtgtgtcgggttggatccgcgccccggcatggatgatttggaggcgattcctgcgctgttgcggaaggttgtggaggaaaccgctccatatgcggcagcgtttaagccgaatattgcctattttgaagccatggggttgcgcggtctggaaatacttgaggatttgcttccggatatgcctaaggatgttccggtggtgctggatgctaagcgtggagatattggagagactcagaagtattacgctcatgcttactttgaacgcctgggtgtggacgctgtgacgttgagtccttttatgggatatgatacgctggagccttttctgaattatgaaggtaaaggtgtttatctgctggcagttacttccaatcccggttctgcggatgtggaacggcaggaactggcagggggccgcagggtttttgaactggtgggagacatggtgctccgctctgtccgggaaggctgtaaaacttccgtaggcatggtggttggtttgaccaatgcagattccagtattctggagcgtattccggatgctcctttgctcattcccggcctgggtgctcaaggcggtgatctttcctgcctgagtggttccggtcacgtggcgcctcccctgattaatgtctctcgaggaatcatgtaccagaatccggaattgggttttgctgagaaggccgccggatttgctcagcgcattcgagaggcattgaattattgatgttcatgtattttttgcaaataacaaaatgataacggcctgcttatggctgtgcatgagcttgtcaaagggaaggggctgatatattgaacaggtgcatccccattccctgcccgttttttatggatgaaaagcctggaattgtaaaattcactccccattccacttccagatccgcaatgttgattgcggtggcagtgacagtgggtgttcaggtggctttgtgtgctgtgcttgtagccatacatttgcaggatatgtggtttccctccgtccagggtggggaagtggaaatgacgtttgtgtccccgtccgaagaagtttctcaggagatggaagaagttcagcctacatctgttgttccggttgcagctccttccacagtcagccctgttccggagattgcgtcagatgaagacttattggcgatgaagctgccggaaaatgaagattgttccgaaatgaaggattttcttttggatgaagctccttccgaactcttgccggaggagctcgccgccatgcggatttccatgaatgaagtaaagcgaaggcagcctgtgaagcgcccggcggtatccctgccggggcgtccggaaccggatcagaatatttctcctgataaaaaggtgcgttataaacatgctccgtccttgcccaattccgtcaattcttctaaagtcgggaaggtgaatgccgtggtgaaagtagtggttggagtaaattcccatggggaaccttcatccgtcaatcttcttcagtcaacgggaaatgcggaattggaccgcctttttatgcgttgggtgagagagaattggactttttatccggcggaaaaggacggtgtgcccattgcttccaaggtggtggtgcccgtcaggctgaatatagattaacctgtacaaggaaatataaagatgcttccggagaagacagagaataggcccgtttatgtgatcggccaccagaatccggatacggatgctatttgttcagccatagggaatgcggagtttttaagaactcatggcgaacctggtgcggttgccgccagatgtggggaaatgacgctgagaacatcctgggtattggaaaaggcaggagtgccggagccgatactgattcatgacgtgacgcccaccgccgggacaatctgtcgtcgtgatgtgattagcgtaagtccggacgatacattcctgacggcgtatcgaaggatgacggaaaattcccttcaaaccataccggttattgacgctgattacaaccttcatggcctattgcgttattttgatttgttgagcctgctcatgcctctgaatatgacggagatgaatgtgcgctccgtcttttccagcctgagcaatatcgccaccaccattgacggaaaatgtctgaccggggaatccttaagtgaagaagaaacgcagaatattctgctggtgggtgcttccagtgaacccagcgttcgaacaaggctcgcaaattacaggagaaaagggattgtccgggatctgattgttatttgtggggaccgtccgaatgtgcagctatatgcagtagaacatggcgtacgcgctttggtgaccacgtccggtgctttcccttccttggacattattgagacggcccagacgacgggaacatgtattttgagtactccctgggatacggccagtgttggccagttgatccgttgttcccggaaggtgagggagcaggttcagaaggattacaccgtttttccggagaatatgccgttgcccgagttgaggcaggctgccgtaaagcgcaagcaggcattgttccctgtgatgagtatcaagacgaacaaaataattggtgtactgagtaagacggatttggtggatccgccccgtacacgtgtggctttagtggatcacaatgaattttctcaggccgtcaagggggtggaggaggcggagattgtggaggtgatggatcaccaccgtttgggtacccagctttctacacgggatccaatccgttttttgaatgaacccgtaggatccacatccaccttggtggcacgcagattttaccatcgtaatgtggaaccctcccaggctgtagcggtctgcctgtgcgcggggattctttcagataccctgaatttgacatctcctacggcggctcgggcagatagagaaatgttggaatggctgacagggattgccaaaatagatgccaagaagtttacagaggagttttttgctaccggttctctgttgcgttccaaaactgaaccttccgttattattcaggcggacaggaagacttttactgagtacgggcataagatcagtatttcccagattgaggaaattggtatgtttggcttggaagatgtccaggaaggtttagtgagggaacttcggaagctggtggagaaagaggggctgaagcttgcttgccttttggttacggatatcgttactcacgattccatgttgctggccgtcggggatgaagaagctctggaaaatatcgagtacgagcggcttggccctaatttgttttccgctactgatgtggtaagccgaaagaaacagctttttcctgctatttcccgtgcattaaagacgttgtagatgccggaaatctttgctttttacaggcaagatttttcctgaggaggaacggcgttgccgtgctgtaaggggtatagatcagggaattgcaatgtctgctacgatagaacggcggatagtatccggtatcagcacagtactggctctttcaggtttgagcggcggcgtgcaaaaaactcggtctaggcgtaatagagggaaattgacaggttgcgtagctccgtaaccggcacctttcagtttgaagcaatcctgaaagtcggaactgagtttggagaaaattggggattgaggggcagcgctgaagttcccggccatgataatgggaagttctccatgctgggttcctacttccctcagggtatcaaacaggtattgaagttgtttacggtggatgaagcggagtgtatggaaatatttccagcaggcgggggagtacaggtcgaagcgatgttcaaaaggttccagactgatgttgatgagccgaatcgccaaggaggaattttccggtatccagtctacaatcaaaccggctgtgtccgtgatgctctgggctggaccaatctgaccgtgccttacaatgatcgcgcaacttcctatttgcttgatataagaggttctaccgaaaatactgtaggcaaatttgagtgttcggttatagttgctgcagccttggacgaaaatgacatctgcacggagtttggatatttgttcaatgggagggggttcctcgcagccctcgtacaaggtaagaacccttatttgcctggcatccggagatggcggcattttgtagtattccattccagttctggcaatgggcgggagaaagtctgtaatgacgatgccgtacgcaacccagacgataatgccaagcagaccgatccgggaaccgaagaccagccatgcaatgagcgccggaaaggagaaaatgagacagcaagcccatatgggcagtgacgttgcaaaagccatcgtgtctgaaccggtccagaaaatagtgacgacgatgacccacaggcacagagagacgccacccagcgctattcccaagtggttgactccggatagcgttggcagaggttctgccagatgtttgcgtcttctgagccgatgcactgtggtgacagattagaagcccatgcctggagggagatccaggcctcctgtcagctttttcatttccgccgcggctgtttccttacccttggcaatagctgcattgatggtttgaaggagaagctcctggagaaattctgaatcggacgggtcaatgatggaaggatcaatgaccagttccgtgaggttgccgtcacaggtggcggtaactttcaattttcctccagctccttccgttgtaacggtttgggaggcgagtttttcttgagcggccgcaagccctgcctgcatttgctggacctgtttcatcattttcattatgttcatggtcgttgtgtctgggtggatgagttgactattgggaaatgatacgagcccggaaaatctccatagcagcatcaatcagcggatccgtgtagtaagagttatcttcattttcctctttggaagcttcctgaacaggctctgcggtttttttctgcggggtatgaggtttaggtgcaggaatggtggatgcggaaggaggtggtgcaggcagaggagccagttcttcctgcacgggttcgggaatggagaaatcctgacggatagaaatagtaacagaggttccaatatattgggaaagagcagcttccaaagctgttcgcagagggccggttccaagactgtccatcccctgacggtcagaaggatgaaaagaaatggcgactgctacaccatcataaccggaaaaaacgctgttggctagaaagtccgcttgaagagggaatctggcggacatttgttccaacaccgttttccagtcttcttccgtgattgttcttcctgattgttgggacagaactgccggttcctctttttctacgggtgcctgggtttgggatgatgtgcttggagtatcgaatagattgtcaaagaaactgttagttcgtctttccagaggaagattttcctctggatccataaaagtaggctctggagaatccgtaggaaatttcgacacatcggaggcatcggagtctggatgccgggtgatttcttcggaggcaggtacggtttttgtccgcaatttagtggcggagtagggaaattcttcctctgcaacggcaagagaggtggggggggcagcgggtgtaagagtttcctgttgtggttcggcttcctgcgtaggatggggagaagcttgagcgtcagtgctctgaattttctgtactgcgggagatgaagcaggggaggacacagaaaaatctggaatcggatccatcaaatgttcttccgtagctggggttgggtttgttgcagcaacaggagactggatgttttgccggggggccggagtgggtgccgtggcggaggaaataaatgtacttggttcctgctgtgaagcaagatctgaagaagaggccggtgccgcggtggctagcggagcaccttccaacgccatgataatatcgctgatgctggcctcagccagagtatgaacggctttaatcaggcccatttccagatgaagccttttattggtggaccagcgcattttatcttccgtttccgccagaacttccaccaaacgcaggattttgtccgtatgggtgcgtttgaccaattcggcgagttcctccttggaggattccgggagagaatcaaagctggcttctggatctactttagagaccagaatttcacgcacggcggagataatttcggaaaggaactggctcatgtctcttcctgcttccgcctgttcatgcagaagatgcaggagagagggaagttccttgttcaaaataagcgccagagcatgggccacggtctcccgggaagtaatgccgaaaatgtggagtacctgctgttcttcaatatgatctccacagaaggaaacaagctggtccagcatggattgtgcatcccgcatacctccatccgccactttggcgacagcaaaggctgcttccctgctcaaacttactccctctgcagaagcgatatggagcaggtgttctgcaatgatttcagaagggatggggcgcaggtcgaagcgctggcatcgcgatagaatggttggcagtattttgtggggttccgtggttgcgaaaataaatttgacatgaggtggcggttcttccagcgttttgagcagggcgttgaaggattccttagtgagcatgtgcacttcatctatatagacgatacggaaatttcctctgctcggagcgaaccgtacgttgtccctgagatcccggatgtgatcaatgccgcggttggatgctccgtctatttcaagaacatccaggctccgcccttccgcaatttcttcacatatatcttcatgcgggtcaaaatccactttgggcccaccgctgcagtttagagctttcgcaaaaattcttgcggttgatgtctttcccgttccacggggacctacaaagagataggcatgggcgagacggttgtgctcaatggcgtttttcaacgtccggacgacatgatcctgtccaaggacgtcattgaatgtcagaggacggtattttctggcaaagacctggtaactcacggttcagaaagactagaagatgagttcccgtttgaaaagaaaatagagagtaattgttttaaaatgttgataaaacggttcttgcacactcccgctacggagcttgcctgaaaaaaatatcaagaaaacaatgaggatgtcattttgatattgaaatctgaaaatgttcatgccaatctcacaaaagtaacaggaaccttctcatctctataatttcctatgtgggtcaaagtatcaatagcagccttggtcattgctcttctcggaggagccatgtattatcttgataacgaggaagctctaaccaaggagcgtagggaatgtgcttcccgctacaagaacctgaacggccttcgtggcgaatttacggaagaaaagacgaaatatgtcgatttcctggtgaagaatgaggctctgacgaatgacatcaatgctttaaccaaggaaaaggatgaactggaagtaaagaatcaggaattggcctcagccaatgaggccaagaaatctgaccttcaaacgcagcaaaccgctttggcggaattgcaatccaagagcaaggatatggaaagtatccaagccattgctgacagaatcaaggggctggaagaagagtccaagcagttggaagtggttaagcaggcggaacagggaaaacatgatgccatcgttgctgaaaccgaacagcttgttgtgaataatgccgctcttcgtcagctcaaggccgaccaggatgcccgcctttctccgcccaacctgaaaacgagggtttcccaggtgattcacgattttaatgtagttgtgattgacggaggagccgccgatctgggcgtggtgcccggttccaagttggccgtcatgagggacggcaacaaaattgccgagcttgacgtaaacgctgttgaatcccgtgtttccacggccactattctaccaagtacggtaaccgccggcgaacgtgttgaagccggagacgtcgttgtatctgttcgtccctagcatttttccggttcaatacactccatacactctcacatacatacacaatgaaaactgtcttagtagttttattgattcttgcagcaggggcgggcgcctggttctccggtcttagcggccttttcggtattaatggccagtaccaggattttaaagaaatgatttcgtatcgtaagaccttggacaaggaaatacgtacttggacaagcttgcgcaacgacatgattaagaatcgtggcttggcagcggaagaaaatcttagtctgatttccaacaaggcttccgtgacgcagcagcgtgatgaacagctttccaaggaagcggagttgaaggaagaagaagtgcagttgaatgcggacttgtccaaaatcaataaacagattgaggaattaaagagcaagttgcaagatttcggtgtttccagcgtacaggaaatccaggagaagatggaatctttggaagcttccaataagaagctccaggaagatattgaccagattaaaagtgctacggaagtggcttccaagagacgggcagaacaagcttctgagctggctagccgccagaaggagcaagctgaataccgagctgctcttgccaaaaatggggaagagtatcccgttctatccgtggatccgcagtggggttttgttgtgattggggccggacagggcagtagtattgatccaaatacggttcttcttgttacccgtgaaggtcgcagcattggtaaattaaaggtaacttccctggagaaaaatcagacggtagctgacattattaaagacagcgtaccgtctggtatgagtattcaacccggcgatagagtacaactcctgcgtccccgtcagtccgccaaataaaggtttgccacgtattttccttgaaccccgttgtgtcgtccggcataatggggttcaactttttaaaaggaaatgatgaaacgatttgcaatctcctttttgtttgtgtctttttctattcttctggtctcttcctgttcctggttgatggaaccgcaggagagggagcgtgtgccgcagccgcctcccggtccggaaaagagtgcgcttcctcataataagacccaaagatttgaggcggaagcaacgctcggcccgttggcctcgccgagacgttaacggcatccgaatgacgctggacggtgattctgttctttacagtatccgacaaaccggatacaaccgcctccggtttccaagtggagagatggctgagctggtctaaggcactcgactcgaaatcgaacgtgggctttaaaacccaccgtgggttcgaatcccactctctccgccagtttttcagtaagagcctcgtcggcagacgaggctcttattttcgataggaagagaagaggcgggaattcagataggcggctgttcagtgatagagggtgcgttcttgaccggggtctttaaggcggtctccgccaggatggttgtaactataataatttttgttggttgtttcggtcggtttaccaatgattacatgatccagaaaacgaacgcctaataatttggagcattcccgcacgcgttcggtcaggaggtcgtccgtacggctgggggctggatttccactgggatgattgtgggcaaggatgaagccataggcgttatgaatgacagtggggcgtaatatgtcacgtggatgagcaatggattcgttcaaggtcccgctggatatttccacgggtttgatgaggcggcacttggtatccagcagcagaacgagtaccgtctccttttccttccagcgcatggctgtagtcagataatcatagacatcttccggtgtttgaatgggttgacgtgacagagtttctcggagagccctcgctcccagttcaaaggcagcgctcagcgtagcggctttcgccatgcctattcccttgcaaatgttcgctatttcagcagcttccatatgagctagggcatctagagagccagcagactgaatcagatccgaggacatgtccaacacatttttccccttgatccccattcggagaaagatagcaagcagttccgcgttgctgaggctgtgccttccttggcggagcaatttttctctgggcagagactgagagggcagttcctgaagtttgcggtaggtcatttcaataacagaggcgtgcggtagaaagaatggcggaaggcagatgtcgcagcgtatcccctgccgtcaatgtttgctgggtggcttctccggcggagattgccatttcggaagctcggccacacaggtagacgcccagaacggcggaaaccagcagggattccccctggcttataaagcctccgcaaatacctgccagcacgtctccctgaccggcagttgccatgccgggatccccagtgatgttataaaaaagaggttttccccgttgggtgacgatggtgcgtgctcccttgtaaaccagggcggcttcatgttctgccagaaagcagtcggcaatgtctgcccggatggcatagttgtctgcatctggcagaagtctgcgaatttctccatggtggggagtagccagaacgtgttctcccaagttccactgcatggccgcggccagattcagcccgtccgcatccagaacagtgggggtacctgtttccagaatgaggcggatggcttccgcatcttcctccgatacggaaccgatacctgggccaatgaggaaagcactgaatgtgcgaatggagatatctgcgtaactgtccacgggtctgaccatgatttccggaggcatggatggagcgattaagggatagacgtttttgtgaacgtgcagtgtaaccagaccggctcctgcccggagagctgcttcacagcagagccgggccgcacccagcattccttcagagccagctatgacgccaatgtgcccgcgtttgttcttataatccgtatagggtcttgcagagaggaatttggtaagccgtgaggaggtaataagttccgtggcggggagcgcctgtacgtgaagaccgggaaggtcaatgcagactaagcgtccggcaaacagggtggcgtcatcgtccagcaggccctgcttaacggctcctatgcacatggtgaaatctgcttccactgcattttgctgaggcattcccgtatctggatccactccggtggggatatcaatagccacggtacgtacagccccgcaacggtttcttatatagttcatttccgcgcagagagcggagatttccctgcggagcattccctttgcccctattcccagcaggccgtccagcaggatcataggttttcccgtacggggaaggggaggggcctggtattcctgagggggaggagatatttccgccaactgccgcacggaaagttcgctccattcgttgcgcgggtaagcggttcggaagcctatttcccagccatgttgtttcagtatgttaaggacggtgagggcatctcccccgttattccctttgcccacataggctacgcacaatcccgggtcggggaagaactgcatgagagattccgcaataccggaagaggccagtttcatcagggttctggctggtgttccgctaacgatgagctcgcgttccgcgatctgcatattttccgtggagcaaactttcatggcatactgatagaggcagcctttactgtaagctaaaaaaccttctcctgcaagccggagaaggtttttaaaaagaagcggaccagggagcagctaaccgatgcggaacgtgatgcgcgctttggtcatgtcataaggagacatttccatacgcactttgtcccctaccacgattttaataaagcgtttgcgcattttgccggaaatatgggccagcacttcgtgcccgttgggaaggcgcaccttgaacatggttcctgccagtacggcgcagatggtgccttccacttcaatttcactttcggagttttcttccttggactctgatttattgaaattctttctgcccttagtgtggcgtcctccgcctccttgcgggcgttgcctgttggcattacctccggggcggcttcctccccctgttctggaatttcccggtcctgcagactgtccggccgaccgtgccgctcctgtgccattgccggaaggtctggattgtccgggacggttactggtgccggtcggtctggaaccggggcgggaattttgtccgccgctggggcggctgctggatcttggattcgggctgataggactctccttgtaaagttaaaatgaacgcgtgtgcaaatcccgcgcaggcgaatgatagaccatatttttgcaagggcaagtcctgaatgcggaagttgtgcaaataaaacacaattctatggagagggacgggaaaaaggctgtaaaagagaaaaaatatttgacatttacgtgaataatcattaggaatgcgcccccgaattggaagataacggcaggatgccgaaaaacgagaacgaagaattgaaccatgaagaccttctcagccaaaccgcaagaagtagagcgcaaatggtatgttatagacgctgccgacaaggtgctcggccgtgttgccgttgaagcggctaacattttgcgtggcaagaacaagacaattttcaccccccacgttgattgtggcgattttgtcattatcgtgaacgcggacaaggtggtgttgaccggtaacaaggaaaatgccaaaatctatacccgtttctccggttacgttggcggtaagcaggtggacaccccccgtaagattcgtgctcgccgccctgaacttcttctggaactggctgttaaaggcatggttcctcacacccgtctgggccgtcagcaaatgaccaagctgaaggtttatgccggcgccagccatccgcatgaagcccagcagcccactgccattactctctaattgatttttcagacatgagtcagacaaccccatacaacgccaccggtcgtcgtaagaccgctattgcacacgcttggcttactgaaggttccggccgcatcacgatcaaccgccgcggttttgaggaatatcttcctaccgttcagttgcagaatgctgttcttcagccctttcaggttaccaataccatgaacaagtttgatgtgaacgtcgttaccaagggcggcggtattcacggacaggtgggagccattcgcatggcgatcgcccgtgctctcgttcaggttgatgaagcttcccgttcccagcttcgtgaattcggtcttctgacccgtgattcccgtatgaaggaacgtaaaaagcccggccgtcctggagcccgcaagcgttatcagttctccaagcgttaagcttggctggttgcgaaggaactggctttaccatttctttctcggaaaaggagtactccctgtggagtgctccttttttgttgcaggaagaactttgctttttactgcttcacgcgtttttaaaaagctttttctggttgggttgcttacggcagctttcaatgattttcctgcatttgctgtgaagggggggaggtttcccagtgcaggaatggttggttgacgagggttaccgatggtatggtgttcctgccagaatagtgtgacagcggtaaagctgttccagcaggacaacaagcgccagttcatgttgaagggtgaatttgctcaaggacaggatatgattgcaccgggaccgcaattcttccgtatgaccgtctgaggctccgatgagaaacgcgatgcggcgtacggaatgcatttgccagtcctttgccaggtcgactagctttcttgtggtccaaagttctccgcgttcgtccatggcgatgcgcaggcaaccctcgctggcggccagcagacgtttagaaacgtcttgggagcttccgtccctgacaagcttgagttccgttttgccgaagggcctgaggcggttgagatagagttccacgccttccttggcgtagcctagagaaggctttccggcggccagaatcaggaattgcatgagaagtcaggagttggaagatgagttaaggtagttcagcagggtgcgggcccaagtttccgaaatgccgcggatggcggcgatagaagccggatccgcctttttaatggcagttacggatttgaatttttccagcaacagtcttttttttgaggcgctcatgcctggggcgtcgtccaaggcgctttcccgcatgcgtttgcggtagagcagttcattatagccgttggcgaagcggtgagcttcgtcgcggatgcgctgcatgagtttgagggctcccgtgctgtgaggcaggcaaaggggctgggactggtggggaaaaaatatttcttccctctgcttggccaggcctacgatgggcatgtctcccaggccgatggctttcaaatcggccagagcggaggaaagctgtcctttacctccgtccacgactaccagatctggaactttgatgggggcttttccttccgcgctgagtttcttaagccactggtacagggtcatgtccgcctgccgtgaggctacggcgtcgctctccgccagaatgcgggagtaacgcctccggatgacttccgacatggaggcgaagtcattttgtccgtccacagtacgtatacggtaccgacggtaggctttgttatccggcttgccgttggtaaagcgcaccatggaggctacgatatggttggaagagacattggaaatgtcaaagcattccatgatggttgggggagattctaatcccagggccacccccagttccttcatgtcttcttccggatgaacggtgccgggaagatcgggagttccttttcggaaccgccgggcgggttccagtaccttgaccagattgtcccggatgtcccgcaggtatgccgcacgttcaaagtccagttcatcggcggcttccatcatttccctggtaagttcgtccagagtgctttttctgcccgttccttccagcagacgcaccgcctggtcaaagttccggttgtaatcattgatggaaatgcggccaatacacggagcggagcagttgcgaatcacatccgcatggcagtgcctgaagtcatggattcccggattttttgtcttgcaggttcgcagccggaaatgccggttgagccattcctgcgtggcgtaaagagcctgggagtggacaaaggggccgaagtagcgcgctccgtcatctttgcgcactcgcgccagctggaaacgaggcagtttttcccccttcggaattttcagcagggggtagcgcttgtcgtccttcatctggatattgtaatgcggacgatattgtttaatcagtttgctttccagcagaaaagcctcctggtcatttctggtttcaaaataatcaaatgacgcaatagcgttaatgagcgctcttgtcttatgattggagagtgtggttcccgtgggagaaaaatagttgcccaggcggcggtgaagatccttggctttgcccacgtagatggtatttccccgggcgtctttcatgatataaacgcctggtttgtgcggagtttccctccagagttctttcagggttggtttctcgcggtctgccacgcaggcattatgccatatgaggcaagaaatggaactgtggaaacgtactgtattacggctacttggcttgcctaggaaaacttcttctgtataatcccctatgtcttttgtatgaatcctgtaccgtttaccacgctggctgccgccatggattttgtagtgggagatagaaattatcccctttccgaactgttcatgaaaggcggtttcatcatgtggccgctgcttttgttatccatcgccggagtagtggtgctggtcatgtgctgtttttctacccgagcttccgccgtcctgcctaccaaactggtggaacaggcggaatctttcattcgcaaacgggattacacgggactttccatcctctgcaagaatggagattcctgctacgctcgcgtgatgttgactgtagccaacttcatgttgcgcaatccctccgcccagtttgaggaggtaagggagatagcctctgcggaaggaggacggcaggcggggttcctaagccgccagatttcctggctgtcggatattggcgccgtagcccccatgctgggtctgttgggaaccgtggtcgggatgatgaaaaccttttttgagattgccaacggtgatttttccgggggcaagcagcgcatcgacatggcgggcggcgtggcggaagccttgattacgacggcgggcggcctgatgcttggcattcccgccatcctggcctatgtatatttccgcagccgtgtacacaaacgggtgggagacctggaggcagccgtcacgcacagtgtttccgtagttgccacccagcttcagaagccacgagccggtgcagctggggcttttcatgaagaggaacttcccaaagtccccgtagatcccacttccctgcgcgatgtgcgtgggctctagccggaacgcatccacttctccacctcaccggaagaatgtatgaaatttcattataaaatgcccagtcccatcgggtttcaattggcccccatgctggacatcgtatttctgctgctggtgtttttcatcgtaacccagacatttgaggatgatgaaccggatctttccatcaatcttccttcagcagagactcccaagcccggtgaaaacgtgtccaatgaaattatcgtgaatatccgtaaagatggtaccgtggtaatcaaccgccagcagtacacaatgccgcagctggaagacaaacttttttccgtcgcccggttggacaaaaccatgctcgtccgtatccgcgtggatgagaaggcggaatccggcgtggtggtgcatgtgatggacgcatgtctgaaggccgggctgaataacgtttctttttccacgcgtcctccggttccatcttcaatcaatgtttccaattcccaggcttcatgaaagcgttttttcccattaatgcaggtttaataactttggcgatgttttccgccgcccaggaaaatattccggatgccgctcccatcgcggatggtccgctggtcgctaatccggagcaggatacgctggatatggcggacatgctgtacaagcaggcccaggctccggctacgaaggagaaccggcaggaatatggacgccttcttgatttaagcttgcgtaaatatctggaatttacccaacgttttccccagtccgcccaggctcctctggcggagtatcgtgctgccatgtgtttggaggagctgggcaggaaagatgaggcacatggcctgttcctcagattgattcagacgggcagccccgccctggttgccgcctccgcctaccgtctggcgacggatgcttcttctgccggggagatagataaggccatccagtattaccagctcgtgattcgcaatgcggaacagaatgatttgaaggtggacgcccagtaccgtctgggacgcctgtttctttccagcggtaatccggaggcagccgccaccatgttttgtgcggtgatgggcaatccggaagcggatgccaagtttgttctggtgtcccggatgggatatgccgccctgtgtgcggatacgggacgcttgggagaagcttattccgaatatcgcaaggtgctggaaacgcccggtgtggataacaggaacaggggaatcgccactcttcaggccgccatgctggccaccaaactgaaaaagactgcggaagcccagggcctttatgaacggcttttgaaggacgagtccctgaaggagatggcgccggaggcccgaatggggcttcttctggggctgtacaatatgggcaagtacagggagatactttcccagtatgagcagcagaagggaataaagatgccgacaaaggacggccaggtgcgtctgttgatgctgctggggcagtccgcctataaattgaaggagtaccggaaagcggcagatttctttctggaagcggaaaagtccgttccttatacgcaggaggccatgcaagcctccttttaccggttattgtgttataatgaacttaagcagaaagatctcccccagcgggcccagagcttcctgaaccattatgccaaggcttttcctaccagtgagctgcatgatatggtgcgcctgatggctgcagagaacctgttcagctccaatccggcggatgccgcccggttttatgccagcattgattttgacaaagtgcccccgaagatgcgtgcggatattttatataagagcgcatgggcgattgcccaggccgggaacagaggtgtggccgccaagctgctgactgattttatcaatgattttccgaaagatccccgcatttgcgaggcattgacgttgcgtggggacatgtatgccaagaccaagaaggaagctgaggcgctgatggattttgaccgtgtgattgcccgctggccgaaagctgaatcagctgccgccgcatggcagagagccgctcagatttatgcgggacgccaggatatggcgaacatggcgaagtattatgaaggcctgattcagaattttccgaaggcgtctcctgccgctttggctgaagcccatttcctgctggggcgtgcggcgtttgaccagggagatttcaagtcttctatcagccatatggctgaggccaagactctggatccccagaaatacggagaacaggttaatgtgctttccgttctgtcctatcacaagctccaggacgtgaataaactgaaggaggccctggaaaccctgcaaaaggaaaatccttccgccgtggctcgtgtgccggatgtcatccccgcatggctgggccttcaggcctatgggatgaaggatctggaaacggcggacaagtatatgacctgggctacgcagaacgaccagcttcagaatgtgaagaaggtgatttggcgtaatttggcgaaggtgcgcttggcgctcagaaagtatgaccgcgccttggtggcttccaacaattttctgaaggatgaggaccagccttaccgccgtgcggacggcatgctggacaaggcttccattttgctggggctgggcaagtatgcggatgccaggaagacggcggaagatgcgctggctctgggcgtggaaggtcctctgatggcttccttgaaaattgttctgggggatatttcctatgcggagaaaaagtttgatgaagcggccaagcattacggtgttacggccgagctgtttgtcaatgacgccgaactgaaacccaaggctctcttcaaggcggcggaagctttggacaaggccgggcgcaaatcggaggcttcccaataccgggcccgcctgcaaaaggaattcccggattggaaacaggatggagagtctttgcctccggacgcacgataagcgttttaaagattgaaaccggaaatggagaacaggcgtaaaagatggtatgatctgtttggattgctgcctcgcaatctgggccgtctgttgctgtggttcagcctcattcctatcgctttcatcatcgttcttctcgtttatgcatggagggcggaccagtatgagctggacgaggttttggcgccgttggaaaattgcgccgcatatgatcgcaacggccagtggataggcaccttgacagatcatgaccgggtgtatgtagcgcgcaatgaactgcccgataatctggtgaatgctttcgttgcgcgggaagatgaagactttttcgaacatggcggcattgtgtactcttccattatccgctccatttgccggaatttgactacattgtcctatgcccagggtgcttccacgattacgatgcagctggcgcggaattgttatgagctgggagggaagaccctggatcgcaaggttttggaaatggccgtggcccgccgcattgagggcaagtattccaaggatgaaattctgacggcttacctgaaccgcatttactttggccagcaatgctatgggattgcgcaggcggcggatttgtatttcggcaaaaaagtggcggatctgacactggcggagtgcgctaccctggccgggctggtgcgcggaccttccatctacaatcccgtttacagcccggaggctgctgccaaggtccgcaatgcgacgctggaaaggatgtttgagtgtgaattcattacccaggaacaattatggcaggcgctccgcgaaccgatggcggtggctggtaaacgggaagctcggcccggttcttatcccgttctggtcgtttcccgtgagttgggagacctggattgctgtgacgagcaggagggaacctccagcatttttgtaatgaccacgctggatttggaatttcagaggatggttgaagatgtaagcgagcctatgctggtcgctctggaatcttcttccgtgtgggcagggttgcccaaaagggtggacaaccagttgaatcgttgtgtgcaagcggccatattgtgtgtggattcccgtaaaggggatctgctggccgtaacaggggggcgttccgcccaggacggtctggaccgatggcagtccaaggtaatgcccggcgatctgttcactcccattgtcaatttatgcgctgtcgaccagcgtagaaccgttattcgcagcaatccggaagtcactggccgcggggtaggtttcaatacagtaatagaaacggcacaaaaggccggttacaaaggggaacttccccgttcttcggacttgtataccggcaggttttccgtgcctctttcgcatgccgtcaatgccctgtatctcatcggcaatgacgggctcaatgtgagtatttcctccgtcaggcaggtgggtaccaccaaaaagaacctggtgatggtgaatgccccctctccggaagaaagccgccgggaaatcctgcctagggaatccgcccacctggtggcgtcccttcctcccttccgctacgacgaacggaccaggaaaaccttcgtcaatgtcaggcttcctggaaatacggggcatttttccgccgtcatggggcgttatttcacggtttttgcctgggtgggctttgattctccggaggccgccgtctatgaaaaaaaaggggtttccgcggcgttggcaaaaacctgttcctctctggccggggaggtgtatgaccgtgcggaggaaggtcgcagaaaagctgtccgggaacgccgggagcgggaaaatgctgcagaacagggctcccaatgaagttcaattttccattagtagaagcatcatgagacactcacttgaaatgaccacggccatccaggccgccaaatccgccggagctttcctgaagaagcatttttatgagcaaaagaaggtggatgaagccagccagaatgatatcaagctggagctggacaagctttcccagaaactgattacggaggaaattctttccgtgtttcccaaccacgctgttttgggagaagaaggatacaccggggacaggaacagcgagtatgaatggattgtagaccccattgacgggacggtgaattatttttacacgattccctggttctgcgtctccatagctttgcgccgccgcggggaagtggtgctgggcgtgatttacgatcccatgatggatgaatgctggcatgtggaaaagggcgggattccgtacatgaatgatcatcccatgcattgcagccggcgggaacgcatggcggaagccgtggtattcgtggggcacggcaagacggacggttccaaggaaaaggggattgaacgtttcgccaggatcgcctggcaggtacgcaaggtgcgcaataacggttctgcggctctggccctggcttatattgcctgcggcagatttgacgcctatgtggaaagcgtcatatccatctgggatgtcgccgctggggttttgctggtggaagcagccggcggcaaggttgttttggaaccgaaggaagataatccggaacaattcgccattgtcgcatggaacggccgcatccctatcatggaggctctgggagaataacccgaacattattgccgcagtaccgtatgaaaaacatgatcgctttgaccgggatcggatatgatatccaccgttttgcggaagttccgcgccccttgatgctgggcggcgtgcatattccttcctcccgcggcctggacggccattctgacgcggatgttttatgccacgccattgcggatgccctgctgggcgctgccgggttgccggacatcggctactggtttccgccgggcgatcctgcctgcaaggacatcccttccctggatattgtggcgaaagccgtttctctgattcgggagcgcggcggccgcatcgtgaatgtggactcgtcccttattgcagaatctccccgtatttctccttatttggagcagatgaagggagctttgggaactgctctgggaatctctccggtccgcgtgggcatcaaggccactaccaatgaacagcttggcgcgctgggccgcagggaaggcattgccgcttttgccgtagcggctattctgatgccggaggatttgaccatgccgtaaggagaacgctccggttccgtttctggaagccttttttcaaaaaaggaagccggtacggggctttaaacaaggaatatgcttcaggaataacgggcaggtggaaatggcgttttttgggggagaccctttcccaggcagttttaatgaaatggcaggaaattgttaaccgttccctggcggcaaagccgtttttggctgcataataatattacccgtttccctgcacagggaagaggtgttgcctgatatctcagctgatgcagcggtaataataatccacgcgggagatgaaccaagaccatttgaagccgggtttgccattgtccagcagaaggtgggggcaacgcttgccggtccagtagtaatggggtacgacattccgcaggggaatatcgtgggcatacatgttgtaggccgccagcttggcggcgcggtcaaaggttttgacgatgctctgtcctcgcttctcacacatttcaatgccgatggagtacatgtctccggggccgccccggtctgcatggcgtcccgtttcattcagggggatatgctgcatggtcacgtatgggtctaccgtataatgccagttgcagcgcaaagctccgttattcagggcgcgcgcatgctgcatggcgtctgcggacgggttttccgtgttgtgcatggtgatgaagcgcggcttcattcgggaagaacggcggcggagcggagaagatttaggcatgaacatcggccggacgttacattccgccagcaattggcgcggagaacgtttcaccacgggaaccccggagggcttaaaggagatcataggagccattcctgcttttccggaaggttccgaacaactggtcagggcaagcagggcggcggtttccagcagaaaagttctgcggtccatgccctggactttctccagcatgggctggagctgaccggaaaagcgggcaagataagtggcgatggtggaaatattgctcatacggaggccgggagatggggaattttcagcacggatgcgggaaaagttaagttcacgctaagattcgctcttcttctttgcaacgaaaaagtgtgaaagcttcagcattgtgccgaattcttcgctctttttgtcatattggtttgcttaaaccgttgttgagagcagaacagtatctgcttctgcggcggtgacggcatccgcgcctgccggggacagaatgaattctcccttccgggccgttttcccgtcccagagcacggaaccgcagagaaccgtgaagacggcaaagcgggaggagtccggctgggtaaaccgttctcccttatccaggcggtattcctttgtggtgaaatacggcatttccgtcaggtatccggggcgctggctgagttcccggaattccccgatggaatccaatgcctgttccaggtgcagttcccgtcctcgtctggagtcatccgtgcggttccagtcataaaggcggtaggtggtatcgctattctgctggatttccgcaatgaggtgcccggctccaatggcatgaaccagccccgccggaatgtaaaggtgttcccccggttccagatgggtggagcgtatcagctgctccatctgtcctgtttccgccgcatgacggatgtccgggagtgtggcgttttcctccattcccccgtaaatcagggcgtccggggatgcgtgcagcacataccagatttcattttttacttctccctgccgggctgccgccgtgcgttccgggggatgcacctgaacggaaagattttcgcgggcatccagaattttgcagagcaggggaaagcgggggaaacgctcgtagccgggaccgaaaatttcctgccgatgttcttcccacagccggtgcagaggcattccttcccattcgccgtccttgacgatactcatggcttcaggacggtcgctgatttcccacgcttctccataagctgtttcccggtcgggcagttcccgtcccagcatggttctcatgctctggccgccccagatgcgcggctggtagatggaatggaatcgaaaaggctgcatggttgtagcggaagcgtaggatatcttttatggacgggcaagcaaaatgcccacagggtttcctgtgggcatggagagagaggaagacggagaattgcctgttatttgatggattcccagacaatgccgatttcgtcaaatggcacgtgttccttgttcttgtccggtttcggaacgccgtagttggtccggaacaggggcaggatgggagctcccgttttaggatccttgctcatgggggccattccaacttcttcaagcagaagagtcatgccgaattccccgccgggaatttcgctgatcagaatctcaatgggataaacattgccttgcttcactttgaaggatttgccggcaaccacgcctcccatggtccggttccagtggccggaagaggagtatttgtagaatgtaacaggagggacattgattccggctgttttgagctcttttttcaggtcgtcgtaaccgggcttgttttccatggctgcaatccatttggtagatgctgtctgttttcctaaggaagcctggaaccacccgtagtcaaatacgttttcattgttgaatcgtacggcaataacgtcgtcgcccgctcccacaaagcggaatgttccggatttcggcgcgcgcactttgccacgatagatagcaatccatcggcttggcttgactttgtccgcacatccgtaagctttcggagcttcattggcggatgtccggggcacgtaaaattgggcggcgtacagctgctggggagatttatagaaacggtttaaatctttttcatcccaaccgtgggtgacaaagcgggagaggatggagcagaactggtcttgggacaggttggtaggacgtccgccaggagtctgcttggtgtcgtaaaaggtacctaccagcgtgcttccggatggttgggacgtaccgaaagcagaggtggagtctcccaggtcggggccgaagccgtcccccatgccgagggcggttccctcctccagcatgacaggttcatcgggcgggtcaatgtcgattttggggaggctcaccggagcggcggccgctgccaccacgaccttgacgggcgtctccgcatgggaggaagaggaagtttccctctgtacttccggcggcggaggcgtatccgacggcggcgcatcgtccggcgtgatgtagccgacgactttgggttcttccggaggggcgatgatgatggtcagggagtagagaatggctcctgccaaaacgacggagagaatggatgtcgctaatgcggcaatataatttttccgcctttccttgcgcagggtttccactgcgtcttccgtgggttctatatgaaggctcatgcatgtatgatagcacaagaatcccatatgttgagtaacatgaagataacagggataacatgtcggtaacaaaaaaggcgcccttgccgtcctttctccgtatgggcttttcagcgtttcccccgtctttccgtccctcccggtgccagcgcaatggcaagggtggagcagatgcccagaatcaggggataatacaggtatttcatgaccagcaggggagaaacctgggagattccggcggccatgagcatttgagcaccgtaggggatgactccctgaaccaggcaggaaaaggtgtccagaatgctggcgctgcgtttgggtgggatatggaatttgtcgcttatttccttggcgatggggccagccgtgatgatggcgatcgtattgttggctgtgcagaggttggccagggaaaccagcccggcaatgctgaattccgcgccgcgcctgctgtggatatgggccgtaatttttccgataatatacgcgatacctccgttgaaacggatgatggacagcacgccgccggccagcagagtgacgatgatcagttctcccatgccggtcatgccgctgcccatggcttgaaaccaggccatgaaggagaaataccccatgccgatgccaatcagtcccgttgcaaggagccccatggtcagaacagccatgacgtggattccggccagggccgtcaccagtacgagcagataggggaataccttcatccattcaatggagatatccgctgtggagggggactgcacgttccatccgagcaggatgtagcaggccagggccagcagggcggcggggagcgccacctttatgttggcccggaatttgtcccgcatggcgcagccctgcgtacgggtggcggcgatcgtggtgtctgaaatgaaggaaagattgtctccgaagaatgctccccccaccacaatggccgtcatcatgccggcgctgacctgcgtggcctgtgccagccctgtggctacgggagccagagcgacaatggtgcctacggatgttcctacggagagggagatgaaacaggaggcgatgaacacgctggcaaacagcagattgtccggaagaagccgcagcgtaagctgcacggtggcgtcaatggctcccatatccctggcagactgggcgaaggctcctgccagcacgaaaatccagaccatcatcaggatgttccggttggctactccggaggaaaacagatccacccgttccgccatgctttttccgcgggtgatgaaaacggcccagacagctgccgccataaaggctaccgtgaccggcacggcgtaaaaatcctgtacggctatggagatgaccaggtaaagcaggaagaaaaccagcagggggctcagcgcccacaggctggctttggcggggggcgtatcctggttgtccggggggctggtcattggagtgaggggagctggccgaaaagtcagttgccgtcggcttccatccggctcagataccaccggtaaatgcgttccactccctcttccagctccacccggtgtttccagcctagggagtgcagcttggagacgtccgtcagcttgcgcatggtgccgtccggcttgtctgcgttgaacgccagatttccccggtatcctgccgtagcggcaatcaggcgagccagtccgccgatggagatttctttcccggttccgatattgatgtggcagttccgcacttcccttcctccttcttgcagctggctgaaatccacttgctccatcacatggacgcaggcgtccgccatgtcttcgctccacaggaattcgcgcaggggagttcccgtaccccacagttccacggaaccgggggtaatgccgtatttggccagcacggccaggatttccttttcttcagccgtgccgtccacctgttccactgggcgcgcgttcagatctttccgcacggcgttccagtctccttccatcaggcacttggccaggtgtatcttgcgtaccatggcgggcagcacgtggctgttttccaggtggaaattgtcattagggccgtacagatttgtaggcatgacggcgatgtagttggttccgtattgcaggttgaagctttcgcacattttcagccctgctattttggcaatggcatagggttcgttggtgtattccagcggggaggtgagcagggcgttttccttcatgggctggggagcttcgcgcgggtagatgcaggtgctccccaggaagaggagcttggatacgccatgccggaagctttccccgatgacgttctgctgaatctgaaggttgcggaagatgaagtccgcccggtagcgggagttggcgatgatgccgcccacaaacgccgctgccagaaagacgtattccggcttttcccggtcaaaaaactcccggacggccgcagggtcttccagatccagttctttgtgcgtccggccaatcaggtgggaatagcctttgtcttccagggatttccagatggcggaaccgacgaggccgcggtgtccggccacaaagattctgctgttttttttcatctcagaaatgaacgggagtttttacgtatttcatgtcgtggcgcaccatgatgcgcacgagttcctcaaacggagtggaggtggggttccagccaagaagggttttggccttggttgggtctcccaacagttgttcaacttcggcagggcggaaatatttggggtccacttccaccagaatattgcccgtcttcctgtcgcgtccgcgttcttccacgccttctccctcccattccagctctattccggcctcacggaaggccagcgtgcagaattccctgaccgtgtgcatttcccctgtggcgatgacgaaatcctccggtgtgtcatgctggagaatcagccacatgcattccacgtaatccttggcgtaaccccagtcgcgcagggcgttcaggttgcccaggtaaagcttgtcctgcatgccctgggcaatgcgtgccgccgccagcgtgattttgcgggtaacgaatttttctccgcggcgttcgctttcgtggttgaacaggataccgttaacggcaaacatattgtaagattcccggtaattcttggtaatccagaatccgtattgcttggctacgccgtagggtgaacggggataaaacggcgtggtttccttctgggggacttcctgcaccagcccgaaaagctcggacgtggaagcctggtagatgcggcatttcttttccatgcccagaatgcggacggcttccagcatgcggagggttcccacggcatccgtttccgccgtgtattccggtacgtcaaagctgactttcacatggctctgggctgccagattgtagatttcatccggctgcacggtctggatgatgcggatgagtgaactggaatccgtcatgtccccgtagtggaggttaatcaggcggtttttcttcatgtcccgcacccattcgtccaggtaaaggtgttcgatgcggcccgtgttgaaggaggaggaccggcgcaggatgccgtgtacttcataccctttgtcaatcaggaactctgcgagaaaggaaccgtcctgtcccgtaatgccggagattaatgcgattttgctcatatggtgtgtcaggttgtttgctggcgggagaggttgatgaaataaaagaaacctctcccggagccgcaattcatgggctccgggcataaataacgcatttttcccagcgaggcgaggaaaatgctctggtctataggaagggggcggagccgtcagcgggcatgttgccgcttgctggccgcaatcattttcctgaaatcccggaacagatactggggatccctggggccgggtgccgcttccgggtggtattgcacgctgaatacgggaagcgtcctgtgggcgatgccttccacggtattgtcattcagattgatcagcgttatttccacgtcgtccggcacggtgtccggatccacggcaaaaccgtggttctgggacgtaatgctgattttacccgttttcaaatctttgaccggatggttcgctccacggtgcccgaacttcaacttgaaggttttcgctcccagcgcgtgggaaataatctggtggcccaggcagatgccgaacatgggcactttcccaatcaatgcagctacttcccggtgaatgtccgtcagcgtggcgggatctcccggaccattggaaagaaagacgccgtccgggttcatggcaagcacttcctccgccgtcgtgtgggcgggaactacggttacgcggaagccgttttccctcaactggcgcaggatgttgtatttaatgccgaagtcaaaggcgacgatgtcgtattccgcagggggcagagtttttcccgtaaccagcgcgtccacttcctccggtgtcatggggtgggaaccgattttgtccacgatattgcagccttccatggagggggcgtttctggctgcttccacggcttcctccggcgtcagctccgtggtgaggcaggcgcgcatggctccggcggagcgcagatgcttggcgattttgcgggtatccaccccttcaatgccgatgacgccctgtttttccagccacgggcccagggattccgtggcacgccagttggagtggactttcgccagttccgccaccacaaaaccgctgacctgcgctttgcctgattccccgtcttccgggttgacgccgtaattgccgatcagaggataagtcatggtgacgatctggccgctgtaggacggatccgtcaatacttcctgatagccggtcatggacgtgttgaagcaggcttcccccacttccgtgcccgtggccccgaagtgcgaaccgatgaagacgcttccgtcttccagtgcgagaatggctctcatggtgatgtaagtatgcttaggtggtgcgggattaaaggttttgggcgtggtactcctgaatagtgcacacctgaagatttttgttcttcagcgcctcaatggcattcacgcaggcctgtgcggaagccaggttggtgcaataggaggttttggcggcaatggcggaggaacggatgatgatgtcgtccgcccgcgcgtcgtgggagccgggggtgttgatgatgaaatcaatatccccgtttttaatatggtccacgatgttggggcggcgcgcctcgttgactttgtaggcgcgttcgcattcaatgtcgtgctggagcaggtgaatcatcgtgccgcgcgtggcgcacagcgtgaatcccatgtccgccagctgccgggccatgtgaagcacccgttccttgtcccggtcattcacggagatgaagactttgccttccgtcggcaggggattgaatgcactgacctgggattttgcgaaagcgatatccgggtccggatcaatgcccatcacctctccggtggatttcatttccggccccagcaccacgtcgatgcccgggaagcggccccatgggaaaacggcttccttcacgcaatagtattccggagtgatttcccgggtaaagcccagttccaccagcgttttgccggccatgacctgtgcggccagcttggcgaggggcttgccgatggatttggagacgaacggaacggtgcgggaggcgcgcggattcacctcaatgacgtaaagctgttcatcttttacggcaaactggatgttcatcagcccgcagacgttcagtttgcttgccagctccttggaagcccgcgtgatttccttgtgcattttcatggaaattcccatggcgggaatcatgctggcggaatcccctgaatggatgcctgccggttccacatgctgcatgatggctccgatgacggcgcgttccctgtccgcgatgacatccacgtcaatctccacggcattttccaggaagcggtcaatcagaacggggcgttcctcggaagcttccacggcttcattcatgtaccggcgcagttctttttcctcatatacgatgatcatgccgcgtccgcccagcacgaaggaggggcgcagcagtaccgggtaaccgatgcgcgcggcaatggcggcggcgtcctccacattggtagctgttcctgcctccgcctgtttcagccccagttctttcaacagggcggaaaaatgttcgcggtcttccgccaggtcaatggccctggggctggtgccgataataggcacgccgtgggcttccagcgcattggccaggttcagtggcgtctgtcctccgaactggacgatgacgccgtccggcttctcctgctcgcagatatggagcacgtcttccagcgtcaggggttcgaagaaaagcttgtcggaggaatcatagtccgtggagacggtttccgggttggagttcacgatgatggtttcgtagcccatttcccgcagagccatggaggcgtgcacgcagcagtagtcgaactcaatcccctggccaatgcggtttgggcctccgcccaggatgaggatttttttcctgcctgtttcacgggcttcattttcatctccataggtggaataaaagtagggggtgtaggcttcgaattccgcggcgcaggtatccaccagccggtatccgggcacaatgccctgttcctggcgttccttccggatgttttcttccgtggttccccgggccagggcgatctgcctgtcggaaaagcccagcttcttggcttcccgcagatccagcttgtccaggctgtctcccgccttggccaggtcctgcatttgtgccaggaaccagggatcaatctgggtaagctgctgcacttcatccagggaaaatccgttgcagaacgccgtttgaatccagaaaatgcgttctgccgtgggaacagccagtttccgcgtgatttcttctgcggaaggcgcctgcggggccttcgcgtcaaatccccagccccagcgtcccgtttccagggaacgcaaggccttttgcagggattccttgaaagtacgaccgatggccatggcctcccctacggatttcatggacgtggtcaggtgttcgtccgcctgcttgaacttttcaaacgtgaagcggggaaccttggtaaccacatagtcgatggtgggctcaaagcaggcgggcgtttcccgcgtgatgtcattccgcaattcgtccagcgtatagcccacggccagtttggcggccagtttggcaatggggaaccctgtggccttggaagccagcgcggaagagcgggaaacgcgggggttcatttcaatgacaatcatgcggccgttggccggattaatggcgaactggatgttggaaccgcccgtttccaccccgatctcccggatgacggcaaaagaagcgtccctcatggcctggtattctcggtccgtgagtgtctggatgggggctacggtgatggaatccccggtatgcacgcccatggggtcgatgttctcaatggagcaaatgacgacgcaattgtccgcgcggtccctcattacctccatttcaaattctttccagccgatcagggactcttcaatcagaatttcggaaacgggggaaagatccagcccccgggcgcatatctcttcaaattccgttttgttgtacgctacgccgcctcccatgccgcccagcgtaaaggcggggcggacaatcaggggaaaggtgccaatatccccggccacccggcgcgcttcctccatggtatgcgcaatgccggaacgcggcacgtccaggccaatgcggagcatggcttccttgaacaggttgcggtcctccccgcggtcaatggcgtctgcgttggcgccgatcatacgcaccttttccctttccagcacaccgctgcggtgcagttccatggcgcagttcagggctgtctgcccgcccagggtcgggaggagggcatccggtttttcccggatgatgattttctccacgaactccggagtaatcggttcaatataagtgcgcggagctgtctccgggtccgtcatgatggtggcgggattggagttgaccagcactacttcataaccctcttcccggagggctttgcaggcctgggtgccggagtagtcgaattcgcagccctggccgatgacgatcgggccggacccgatcacgagaatctttttgatggaggtgtctttaggcataatggcgatggaagaatcctgtagtcctggaccgcggatttccgccgggggaattaagtgcccgccgggctccggaggaaagtttttttacggtcaatgacgcggatttttagagcgtggggaacggtggaaaacggagtaggaaggaggccggaacaaggcgcgccaaggctccggagccgtgccttccctgcgggcagaggcttgacccgcgagggggcggcacaactccggagctcgtcggtgcacccactaatagatgaacagcatttcccggtacttggggagaggccaggaccggtcgttcaccagggtttctgcggcatcgacgctggttctcaatcgggacatcgcagcaaggatgtcctcatggcagctcgtaagcgccgtctccagggtatccaggtcggatacgatggaatccagggcgtcgcccagcttgtccgccagcttctgcagggcggcggtaccgttggtccgcctggcttccagcgccctggagagcgcggcaacggtttgcccgtattcgttgcgcagggcggggaggatgatggtggccgccatttcccaggacaggcgcccttcaatgcggatgcgtctgtggtattcttccaggaaaatctcaaacctggattccagctcccgcctggaaaagacgccgtacttttcaaacagggccacattcttttcattcaccagggtgtgaagggccgtcatcgtatttttcaggttggggaggccgcggcgttccgcttctttcacccattcttccgaataattgtccccgttgaagatgattctcttgtgttcggaaatcctgcgcttgagcgtttcctggagctgcggcaggaatgtttccggagcgaaggaggaaagttcttccgccagggaatcaagggattccgccacaatggtgttcagggtcatcatggggcccgcgcaggattgggcggagccaggagcacggaattcaaacttgttgccggtgaaggcaaacgggctggtgcggttgcggtccgtcgcatcccggggaagaacgggaagcgtgtctacgccgatcttgagcgtatcgttgcgcttgccgcagccggaagagccgttgatcatattctcaatcacttcattgagctgggcacccaggaagatggagataatggcagggggcgcttcgtttgctcccaggcggtggtcgttcccggcgctggccacggaattgcgcagcaggtcgctgtgcttgtcaacggcctcaatgatggcggtcaggacggtcaggaaaatggcgttctgctgcgggtccgaaccggggtccagcaggtttttgttcccgtaggaaatggaccagttgttatgcttgccggaaccgttgacgcctgcgaagggcttttcatgaagcaggcataccaggccgtgcttgctggcctgctggcgcagaacttccatcaccagcatgttgtggtcgatcgccaggttcacgtcctcaaacaaaggagccagttcaaactgcgcgggcgccacttcgttgtggcgggtcttggccgggattcccagtctccagagttcctgttccacgtcgctcatgaaattaaggatacggggcttgatggagccgaaataatggtcttccagctgctggtgcttggcgggaggggcgccgaaaagggtgcgccccgtctggaccaggtccgggcggttcaggtagaagttcttgtcaatgaggaagtattcctgttcaggccccagcgtaatggtcacgtgttcatccggaaggccgaaactcttcatcagcttcttgacggcattgcccaatgcctggcgggagcgcagcagcggagtcttcttatccagagcgtctcccgtataagaacagtaggcggtagggatgcagagcgtggctccgttcccgtgcctcttgataaaggcggggctggtggggtcccatgcggtgtagccgcgggcctcaaaggtgcagcgcaaaccgccggaggggaagctggaggcgtccggttcgctcacaatcaggtttttgccggaaaaactcatgatgggttccattcccttgggatccaggaaggaatcgtgcttctccgccgtggagcccgtcatgggctggaaccagtgcgtatagtgagtggctccccgttccagagcccactgcttcatggcgtgggctacatccgcggcaatatccgcgttcagcggaagcccgtcctggatagtggccaggagggtttttgccgtgtctttgggcaggtacttcttcatcacttccgtgctgaagacatccgctccgtaataatcaatgctgaccggagcgctctcgcttgctccgcccacgggcagggaagcgatggcgctgatggcttgtgttcgtgttgagtcactcatcatggttaactgttgtgccttttctccagcaagaagcgtgccaacttttcagataaactttcgcatgaatgtgctgttcattttaatatattgattattagttagatatggatatcctgacggaagggctgcaaaaaaggaaaacagagctgcgaacgagaatggattacaaaaatgtaaaaccgcaacaaaaggatgattacaaaaatgtaaaaaattcttcttggaagaaaaatattttttattccgctgccaaatgacctgttgtgccggaagccgcgtcaggctctgtaaaacagggacaaagcagtttgaaagcgggaagatatgaagtgtggacaatattggcacggtttttgctgcaaataaatcagcttaacccaaacaaaacagcaaactgatgaatagcgatcaatttgagacaggcattcctgcgccgcagggattgtatgactttgaacaggagagggacgcctgcggcgtgggtctggtggctgacctgaagaatgaaccgagccacaaaatcattgaaatggggattactgttctcaagaggctcatgcaccgcggcgccgtggggagcgatccggataccggggacggcgcaggcattctgctggcccttccggatgaatttttccgcctggttcttcccaacaagcttcccgccagaggcaaatacggagtggccatgatgtttggcggatgcggccatgaagaggaattggaagccgccgttacggaaaacggcggcagcgtgattgcgtggaggcaggttcccgtggaccgggacagcatcggcaaaaatgcccagcgcacgtgccccctgatccgtcagctgttcattgacggcagcggttttgcggaccaggcggaatttgaacgcaaactgttcgtgatgcgccgggaaatggaacggcgcgtggaaggttgttatgtgtgcagctgctccagccgaagcattgtgtacaaggggctgtttctcggcacgcagattgaaggattttatggagacctggccagcgagcatttcaaatctcccctggccctcgtccaccagcgctacagcacgaatactttcccaacctggagcctggcccatcccttcaggtatctggcccacaacggggaaatcaacaccctgcgcgggaacctgaaccacctgagcgtgcgtgagccgcatttgtcctccaccctgttgggggatgacctgcaaaagctgctgcctcttattccccccggccagagcgattccgcctgcctggacaacatggttgagctgctggccgcctctgggcgggacttgcgccatgtcatgctcatgctcatgccgcaggcctggggcgtcaactaccatttagggccggatgtacgcggcttctttgaataccactccgccatgatggagccctgggacggcccgaccgccgtcgttttttccgatggtatcaatgcgggcgccatgctggaccgcaacggcctgcgccctgcgcgctatacgctgaccacggatgatattttcattctggcttcggaaacgggcgtagctgatattcccgcggaaaaagtagcccgcaaaggccgcctccgtcccggggaaatgatttactgcgacctggtgaaccaccggctggtatccgatgctgaaaccaagaatgaaatggccaggcgcatgccctaccgccgctgggtggagaaaaacaaaatttccgtccgttccctgtttgattccatttccgcctctgcggaaatgccggacctcgtgggccgccagcgccagttcggatttactcaggaggatgtggagctgattatccgccccatgatgctgaaaggcgcggagcctctcggctccatgggaaatgacgcgccgctggccgtcctctccggaaaggcgcctctcctgttcaattatttcaagcagctgttcgcccaggtgaccaatccgcccatcgaccccatccgggaggaactggtcatgagcctgactacatacataggcaaccatcccaacattctggaagaaacgccggagcacgcccggctgatcaagatggcgcgccccgtcattacggatgaagaactcaaccgcctctgcaatattcgggaggccggcttcccttccgccaggctttccatccagttcccggaaggcggggacgggaaagccctgcgggagacgctggaaagcctggcggaatccgccgtgggtctggtcaggtccggcgtgcgcattctggtgctgacggaccgcaacatagggcacggctaccttcccgttcccagccttttggcctgttccgtggtgaaccgcgcgctggcggccgccgggctgcgttccgacgtagggctgattctggaaaccggggagacgagggaaaccatgcactttgcgctgcttctgggcttcggggccacggcggtcaatccgtacctggctctggcgacggttacttccctggccgcaccgcaggactgccctctggatgtagtgaaagcctccggaaactacatcaatgccatagacaagggactgcttaaaatcatgtccaagatgggcatttccacgttgcgcagctaccgctcctcccaactgttcgaggcggtgggtctgaaccgggaactgattgacgaattctttcccggcaccgtcagccgcgtaggaggcatagggctggatgaaatagccgcggaatgcaaccagcgcgccgcgcaaaacgcggaacacggggacaagctggatgcgggagggcagtacaagtataagaaaggaggggagaaccatctctggaatccgcagacacttcaggctttccgcgctgccgtgcgtgacaatgacgaacggaaataccgggaattcgcggattacagcaaccgtcaggcgcagcatctctgcactttgcgcggcctgtttgaatttgctccggcggacgctattcctctggaagaagtggaaagcgtggattccatcttgcgccgtttcgtttccggagccatgtctttgggttccctcagcccggaagcccatgaaaccatcgccattgcgatgaataaaatcggagccaaaagcaattccggggaagggggggaagatgaagcccgctatgaacccaacgcccggggcgaagtccgctacagcgccatcaagcaggtggcgagcgggcgttttggcgtgaccattaattatctgcgccatgcttccgagctccagattaagatggcccagggagccaagcccggggaggggggccagctcccggcgcacaaggtggatccatacatcgcccggctgcgccattccatgccgaacgtcagcctcatctctcctcctccgcatcatgacatttactccattgaagacctggcccagttaatttatgatctgcgcaactccaatccggatgcccgtgtttccgtcaagcttgtttccgaggtgggcatcggcgcggttgccgcgggagtggtgaaggcccatgcggatgtggttgtggtcagcggccacgacggcggcacgggcgcctctccgctcaccagcgtgaagcacgccgggctgccgtgggagctggggctggcggaaacgcagcagacgctggtgctcaacaaactccgttcccgcgtccggctccaggtggacggccagctgcgcaccgggagggacgtcgtgatggccgccctgctgggggcggaggaattcggtttcggaaccgccatcctggtctccatcggctgcgccatgctccgcaggtgccacgaaaatacgtgcccggtaggcgtcgccacgcaggatccggccctgagggccaaattcagcggcaagccggagtacgtcatcaactacctccgcttcgtggcccaggaaacgcgggaaatcctggcttccctggggcttcgttccctggatgaagccgtaggcagggcggatctgctttccgtaaaccgcgccatagatttttacaaggcccggcatttggacttttcctccatcctgcatgcggcagagggggacggacgcaggtttgacccctcttttgaaaaggaaccgctggacaactacgaccgccgccatctgctgccggcattaaagcccctgctggaaaagggggaaaagacggaactctgccgcgacgtccgcaatgtggaccggacggtagggacggaactttccggtgagctggtgatgaaattcgggccgcgcggcctggcggaagatacgcttacggtgcacttcaccggatgtgcggggcaaagcttcggggcttttctggctcccggcgttacctttgaacttgtcggggaggcgaatgactttgttgggaagggcctgtccggcggcaaaatcatcgtgcgtcccccggatcatatctcctacgtaccgtcggacaacgtcatcgccggaaacgtcatcggctatggggccacttccggcagcatcttccttcacgggcaggccggggaacgtttcgccatccgcaacagcggcgccaaaatggtggtggaaggcattggcgaccacggctgtgaatacatgaccgggggccgtgtggcggttctcggcaaggtgggcgtcaatttcgccgcggggatgaccggcggcctggcctacgtgtatgatgcggacaacaacttcgatcagaaatgcaacctgggcagcgtggacctggaaacggtcatgccgcattccgccgatgaagcggaattgcttcagctcatttacgagcattatatggctaccaggagccgcagggcttacgacctgttaaacaactggccggaagaacgcggcaaattcatcaaggtattcccggtggaataccggcatgccctggccatgcattcctgaaagaagcatgcagcagttttctgttgtttggggtaaggcaggggtctccgcgggtgcggaggcccccattttttcagaggcctgcctgctgtttcatggccgggcattttggcgccgcttttcctccttgagccattccgcatttgaagctggcaatttgcctgtccggcggcatttcggaggctgttccgttcgtttgccgggtaacggccgttccggctgccggacatttggagacgaatgttccggataagaaggtttttatgaccgtgctgtcagttgataaagaaatgcagctacatggatggggatggtagttgcggttgatgtcaggaggaaggtcaaatgttccggcaatgcccggttctgagcggattatgaattcgaagtcaacaggaaagtttgaatggaaatgtgttagtggagtttgggttttggaaattcggctggatggaaattgataaaaaagtgaattgaaaggtaactgattggtattcttgttatttagttattcagggaattgccgcgaattcataatccgttaggtttgctccagtgggtgtttggtattttctgccaagctgctccaattaactacgcaatgaatatatgacgaggaaaaccggccctctccaggtggagagggccggttttttgaggaaattctgtaagggagttcctttccctttttgaggcttgcgccggcagaatattttttcctgcgcctttccatgaaaaagtgcggccgcgggggcggacgcacttgcggagacggatggcagagcagggattcctactttttaggcgttatattgcgcatgttgcggcctttagctttgcgctgctgttcttccagggccgcacgctgctgctccatcatcttttggaaaaagcccgactttttctttttggcgggggaaagcacgggcatgggcaagcggcggataagggccgtttgtcctatggagatcaaattctgcgtggtccagtacagggccagggcggaagcgaaattgtaacagaacaggaagaacatcacaggcatcaggttcataataatgcgctgggagcgttcccccgcctgaggcgtcatcctcatctggataatcatggttacggccatgatgagaggcagaatattgattggaacgccgaacaggtggcccacggtatcaggcagggaaagatccgtcatccacaggcagaagggctgccccctcagttctgcggaatactggagcacacggtaaaaggcaaagaaaatgggaatctggataagcatggggacgcagccgctggccgggttgatgccgtatttctggtacagcttcatcatttccatgttcaccttctgagggtcgtccggatatttctccttgagtttgaccatctccggctgaaccagggacatgcgtttcatggccatataggattttttgtgcagcggccagatgagagcacggacaacgatggtcatgcagatgatggccacgccccagttgccgaaccatccgtggaagaggttgagcagccagttcatcggaacgctcaggaatacgagccagccgtatgccatgatatcgctgatggcgggataggaaagattcaggtcacgcaggtaggcgttgaatttggggccggtgtaaatatcgtaggtgagcgtcttgatttcattgggggccatggtcagattggggattcccatggccacggtgacgccgggcaccagggtgttgccttcatgcgtcaaaggaaattcctggcgggtggcgtacacggtggaccccctggactggtcctggggaagaaggatggtggcgtaatactggctcatgacgccggcataagtcaggtcctggagagggccttccaggacgcgggccttggcgctgctgaaaaagccccctgtgaaataggaaggcacttcctgttccagggagccgtctgcatggtaaaagaaatgggtgtaggtatcttttggttcgcttttagcgataggataggcgctcccgccgaagatgcccatgtagcgcagatcctggacattgggagatttattgagcagggagacggtcaggcgaatgagatatttgctgccgggcaacacttccccttccagatttttgacggggtgcagggtgtacgtttttgagatgaaaagctgccgtgcggggtcatagccttccagggttacggagtccgccgtgcgtttcacttccttatacacggtgttgtcataggaaggatcctgggtggcatccatgttgaaaacgagttctccgatgccccgttgctgggcttcgttaatcgtgatattatgatccgcaactttttgggagtccacgatatcgttgtgcagggtaaccgtgccgatggaaccccctatgcggttgaacgtgtaagtgatgaagggttcctgcctcccattcacttcctgcgtggctaccagagtgatcggggcggttttgtcttcttcaagggctttgttgacggaggcctgttccggggcggaggttccggctccggggcggacgccggcaaccggggcattggctgcggcggcagccgcctgcggtgcgggaatgggggcggtttcagcctttttattgttgcccatgtaaatattcaggcccagaagggcggcgcagatgcctatgatgatccatgctgtgcgatccataatgtgatatagcttgattggagttggtgaaaggaaagggaaagaaaggtaattgttcagcgtgggtggcgcgccgggggcacgggatcataacctgatccgccccacgggttgcatcttaaaatacgccatgtgccaagaagaaagccgcgccaggctccgtggatgtgaacggcctggatgaagtactgggaacaagtgggtgtatagcggcagccgctcccgggcccccccagggcatgcaggggagcgctgatgaaggtttggtatcccttcacaagggtgatgagcagccatttcatcatgtcttgtcttgttcccgggaaagaagttgcaatttaagttttcgggcggctttccgccagtcccgttccaggtcggcgtagctggcttccacggccctccagcggaggacgcacaccaggtgtacgccgttttcaaaaggagccccgtgcgccctcagtatttccctcacgcgtctccgcagtttgttgcggacaacggcacagccgatttttttcgtacagatgataccgaatttggagggttcctccggatgttccaaaggggctgcgcttaaaacaataagccgacctgctacggatggcccctcgttgcgtacccgggcaaattggaatgccctggtcatgctttgttgacgagtaagacgcatctcccgcgggtcggcccgtgaaaagaagttccaaggaggcgttaaccggatcctggcggctggattaacggccgtgctggatggtgtggcgcttgtactggatttcggctcccttgggaagcaggcgcttgcggcctttagcgcggcggcggcggatgatgtccgctccgttcttggtggccatgcgtgcacggaatccgaactgacgcttgcggcaacgcttggatggttgataagtcctcttgctcatgatgttgaaagatgcttcttgtgaattactagattcagtgccgtccgtctaagcggcctatgcacaaccggacggaaaggataactattttgattgttttgtcaatccgtcaggcgattaatttgccgtttttcttgcggaaagcactgggataaatagtctttatgattgatagacagtgtttttctatttcagaaaagcccgcctgctttacagaaagagcaattccgcgtatgtggggacgggccacaggtctgcgtccgtcaggctttccagcatatcaatggtgcttctcaaattgtccatgcccgtctggatggccctggtatcggcttcatccacggcgcggcgcagttcccgcacctgtccggggagaatatccagcagcgtgccgatttggttggcgcgatccgtagtagctttcattcccgccttgattccggatgccttcatctgggcaatggcggtggtaagctgcgtgatctgttccgttacggcggggatgtaaagggtttccaccatcaggagggccgtttccgcttcaatgttgatttccttgtggaatatttccgtctggatttcatggcgggcgtggagttctacggggctgaccactttgtacttttcaaaaagcgccttggccttgggcgtttccagagcggccagggcttcaatggtgccggggatgttggggaggttgcggcgttccgcttcctctacccaggcttctccgtaaccgtccccgctgaatagaatgcgcttatgcttcttgatgatgttttgaaggagcttgttgagggtggcgtggaactcctcgggcttgtccttgacaggttccaggatggtgcagatttcatccaggctttccgccacaatggtattgagcaccgtcatgggccatgcacaggtttgggaggaacctacggcgcggaattcgaatttattgcctgtgaaggcaaaggggctggtgcggttccggtcggaggcgtccagagggaacatgggcagggtgtccacgccgatgttgatggtcttttgggtgcgcgcttttttagtgcctcctttctcgatttgctcaatgatttcatccagcagatctcccaggaagatggaaatgatggccgggggggcttcatgggcacccaggcggtgttcattgccggatttggcgacggaggcgcgcagcagatccgcatgttcgtccacggccttgatggtggcgcagagcagagtgaggaagatggcgttttcctgcgggctggaaccgggattgagcaggctgccgtaaccgggggcggagagggaccagttgttgtgcttgccggagccgttcatgccggagaagggcttttcatgcagcaggcagaccatgtcatgcttgttggcggttttccggagcacctccatgaccagcatattatggtccacggccaggttctggctttcaaaaatgggcgcgatctcaaactggccgggagcgacttcattgtggcgcgttttggccgggatgccgagtttccagagggcttcgtccacgtccaccatgaattccagcacgcggtccttgatggagccgaagtagtggtcttccatctgctggtgtttggggggcacattgccgaaaagggtgcgtccgcacatcatcaggtccgggcgcagggcataaagctgcttgtccaccaggaagtattcctgttccgcccccagatcggcgctgacatgaatgttgtccggaccgccaaagcaggacaacagccgcttggcctgccgggtgacggcagtcatggatctcaggagaggcgtctttttgtccagcgcctgtcccttgtaagagcagaaagcggttgggatgcaaagcgtggcgccgttttccgtccgtttgatgaaggcggggctggtggggtcccatgcggtgtagccgcgtgcttcaaaggtggcgcggagaccgccggaagggaagctggaggcgtccggctcgccctgcaccaggctcttgccggaaaatttgagttccagatttccctccggatccacgtccacaaaggagtcgtgcttttccgccgtgctcccattgagaggctggaaccagtgcgtgtagtggctggctcccttttccagagcccacgtcatcatggcctgagccacttcattggcgatgtcggggtccagtttttcgtccttgcggatggtagccagcagttttttgtaaacggggcggggcaggtaattgcgcatggtctccatgttgaagacatcctgaccgtaaatttccgcaataaaggttgcggcgttgccaacatcggaaggtgggtttgtatgcatcttgatagggaacgcgccaaaaggctcggaacataccaaaccttaaaagagactttttggcaagccgaatcctgccctatttctgcaggaaaaggacttcttccgcccccatccgttttcgggaagaagcgtaaacggttttccggtttctatggttctccggcggcaatggagaaattggggaaggagggggacgctgtaaaggaagggatgggccgtgattgtcgggaagagggccggacgggagttggtgaagtgccgggttttttgtttcatgaaacagcgcgggagcctgccgatcggtattttcccgtatcttgcaagaaatttatttcgttttcagtagtaataagtacaaccatattattgtgaaatgcgttttctgttaatagcaagatgtttattgttgatgatgctgtgttgtgcgggagcggggatgcggcttcatgcccagcctttgaataagggccggattgccattctgggtgatagtattgcttacgcgggccattgggccaatgaagtggaaaacaccttgagggacgataaaaaatttgcagcctgcgagattgtcaactttgccgttcccagcgagacggtagccgggttgagcgaatatggccatgcgggcggcagattccctcgtccatgcctgcatgagcgcctcagccggattctcaagatgtaccagcctcaattgattctggcctgctacgggatgaatgacggcctcatgcaggcgtttgacaaagcgcgttttcaagcgtaccaggaagggaatatccgccttaaaaaggctgccgatgcggcaaaagcggagattgtcttcattactcctccattgttccggggggattccgctgaacaggctgagtacgacgctgtattggacaagtacgcggaatggctggtttctaaaagaaaagacggctggaaagtcatagatatccgtcccgggcttcggaaactcattgccagagagaaggccgggaatcccggtttcaggtattccggtgacggcgtgcaccccggtccggaagggcatcatatgatagcccgggaagttcttgccgggctggtcccggaaataggccttgctcctgaggttgcggaaaaagaccatcggccgacgccggatacgatgaaaaaacatgagaaagtccgcaatgaatggcttgtaaaaacaggacatgcacggccggaaattccggggtatgatccggaaatggccaagcgtcagtttcctaggacggtttctgtctggaatggttttttacgggaggagtttgccgtgggcggccgcagggcattcatcgtctttcccgacaaggctgttgtttctggaaaagaacagttgtggatatggcggccgcaattttttgattataagcctatagcagatctcgaactggtaaagcgcggttatgcggcggtatttatcagcatggaagacctttacggttctcccaaggccatggatgtgatggatcaattttacaggtatctggtggatgaacgcggtttttccagaaaaacggtgttgtttggactgagccgtggaggcctttatgcgcttaactgggcggagaagaatcctttgtgcgtggctggcgtttatgtggatgcccccgtctgtgatttcaaaagctggccggccggcaggggcaagggcaaaggttcgccggatgactggaacaaatgcctgcgcgcctacggttttaatgaacagcaggctttgtcctataaagataaccccgtggacaatatgcgcggcatggctaaagccggaattcctttgttgtttatttcccggacggaagatgatgtagtccctattgaagagaatacggatgttttcgctaagcgttacgccgggatgggggggcctgtaagagtcatccgccggtccggagggcatcatccgcacggttttgacaatcctgcccatatcgtagattttgttctttccgttaccggacggcccgtccccttgcgcgttgcgtgcctgggagacagtaatacttttggagcaggagtagccggagccaataaggatgttttgcgctggagccatcttcttggtcaggaattgagggaaaaattcaaacggaaagaaatagaagtgctgaactgcggcgttaacgggcgtacccttctggccaagggagaccttccctatattaaaacgggcgagtaccggaatgcgctcaattcccatgcacagattgccattatcgcgttaggcaccaatgacgccaaaccgcagaacaggaaattcctgtccgagtttaagcagaattatgccgccatcatcgccgaactgcgggaaaacatgcccggtattcaaatctattgcgcaattccgcttccctcgtggcaatcttccagccaaattgacaaggaaacggtgaaaaataaaattgtccctcttgtgaagcaggttgcgaaggacaataagtgtaaaaccatcgacttttttaccccttttcaaaataaaccggaactttttcccgatggcgttcatcccaatgccgatgggcaggtgattatggctgatgctgcgctcaaggaacttctgaagaagtagttttttaatttaatcaatacggaataaatgaacgccagactatcggcaatcacaggttcgattctcctgctgtcgtccccgctgcagggattttccgcaacaactcatccggattcctgcatgaaccgggattggaaaaaagagattcccctgccagtatatccaaaccgggaaatgacggaactttatcaccaaacatgggaaattgcggcagggcgcgtcaggaaagggccggaagggctccccgcgtctccctatatggatgaaaattgctacgaagatcaaatctggatatgggacacctgtttcatggtgctttttgccaagtatgcgcccagggcgtttcccggaatagaaagtctggataatctttacaaacctatccatgaaaaagccgctacgccccttagaatccatttagtagataatcccccgctgtttgcttgggtggaaaaggaatattttgatttcacaggagataaggggcggctgaatcatcttcttaatgaaaagcggtatttgcagaagcatttcaaatggtttgcccgggctaaggctggtgaacggtttgaatgttccccccagcgtatttacttgaattccattggggatgatggctttacctggacggggggagcgagcggtatggacaatactccccgcgggcgtgatgccggaggataccataaggtgttatgggtggatgccatttcccagcaggctcttagcgcccactgcattgctaccatggaacaggctttgggaaatgagaatgaagcaagaaaatggaacgctgaatatgaagcgcttaagaaaaagatcaaccatctttactgggatgagcgggatggattttattacgatgtcaccattgcggacaaacagccctgccgcgttaaaaccattgcttcctattggccccttctggcccgggttgcgtccagggaacaggcgcggagcatggtaaatcatctgatgaatcccggggaattcggaggcagttatccgactccttccctggcccgctcggataaggattatcatcatcaaaccggggattactggcggggaggaatctggctgccgacgacatatatggcgattaaggccattgaaaagtatggctaccatgaggaggccgatgctattgccgagaaggttatcaaccagcagcttgccgcttacaggaatatggaaccgcatactgtctgggagtgctatagcccaagcggagatgccccctccactgaacacggacgccgtgtaagaccggaattttgcggctggtcagccctggggccgattgcgttgttcattgaaaatgtgctgggatttaagaaagtgtccgccgccggaaaggaagtccggtggaggttgaaaaaaaacaagggccgccatggaatcaggaatttgaggtttggcgatattgtaaccgatattgtttttgatggtgaaggcacggtgtcggtcacgtcgaatgcttcttactctttaatcattaatggcaatacttattcagtaaggaagggggatactgaaattaagctgtaaggaccttctgtttatccacggaagggcgtcattgatgttcttccgcgggttttttccttttgccggggcaagatgcgggtttttcccgtgcctgcgccaatttttttcttttggaggcggcctgggaggcaagggtgacaaaggaaattccggaagggcggcaaggcaatgttccggaacattacttgagaggtaatgctgtctgccgttttaacggggagagcaggcttcctccatatgccttacggaaattttttggtaaagggtatgggtttgtccgggagcgagggaaatggaacggggctccgcgtttcccgtttcaatgcacaggaatttattccaggactccgcacccaggtccgccatgtttttggcgccctgttgtccaggattccagacgatgacggaagaggcatggttccgctccaccgtgatggcgcggttcagcatgaggtcttcaagcattgtttttcccgaacaggaggggaagttgtaaacgcggtccagacaccccagcggcgccagcgggcgttctccgtgcttcatgggatgggcggcttcttcccggaacgggatgtcctctagcccatgaacgcggcatttggtcaggttgccgacggcaaagtagttgtggaatgcttccgtgagcttgcagggctgcgtgcgcgccgtggtttccagcttcatggccagcgtgcggcccagggtaaggcgcaggatggcggcgggataggattcatcttctggatagaaagccagggagagcaggacgttgccgcacttgtccatttcctggtggtggaggcgccattccgaggtgcgcgctatgccgtgggacggcgcgccttcccgggggccgaaccagggccagcagacggggatgcctccgcggatggctttgccggggacaaaggctgcgttgggagaaagaaaaaggcattcctcatgccctgccggcttccatgaggtgaggtgcgctccctgaaggcacagggatgccgtgcagagcggtgttgttacgtccaggaaagaaagcccctggtttgttgtgcgccggacggtcatggctgaaggcgttcaattgtccaggagccgttttcctgaagtttgtacatgaaacggtcatgcacgcggccggggccgccctgccagaattcaaaggtatccgggataattcggtaaccgccccagaaggagggaaggggaatttctcccttggagaatttgtttttcagttccatcaacttcatttccaacagttttcttccggaaatgacggagctttggtgtgaaacccaagctccaagctgggattccttggggcgggtgaggaaatatttcagggattccgcgcgggagactttgacggcttttccgtaaatgatgatctggcgttccagcattacccacggaagcatcatgcagacctgcggattttcttcaatatcgcgggccttgtggctgccgtagttggtgaagaaaacaaagcccgtccggtcaaaatatttgagcagcacggtgcgcagggagggcctgccctgggcgtccgccgtggccagggaaaaagcgttgggttccggaatatccgctttcagggcctgttcaaaccaggtttggaattgttcaaagggattttccgccaggtcctttctgtgcagctggcctttgaggtattcttctctgaaattggacaagtccatggcgtgttgaacgatgaggggttattctacgctgaaatccagccccaggtccagggagggggccgagtgggtcacgtagcctacggagacgaagtccacgccggattccgcaatggcggctaccgtgtccaggtgaacgcctccgctggcttccagcaggggggtggtgtgtcctccgcgcaaggcgacggcttgtttcagcatttccggcgtcatgttgtccagaaggatatggtccacgccttccagtttaaggaagttgcccacctgttccagggtgtccgcttccagctggatttccacgccgggcttttcctgacgcagcctgttgatgcattcctgaaggtgttccgtatttccatccgtcatcaggtggttgtctttcaccatggcgcggtcataaaggcccatgcggtggttggtgcctccgccatggagcacggccgctttttccagcagacggtagccgggagtggttttgcgggtatccagaatgcgggcgctggtgtgggaaatggctttcacatattgtctggtgagcgtagctactccggaaagacgctggatgaagttgagggcggtgcgttccgccccaagaatggagcgggcggacccttcaataagcatcaccacggcgccgggcgccacggcttccccgtcatgcaggtaaacttccaccttcagggtgggatccaccttgcggaaaacttccgccgcgacattgacgccggaaagaacgccttttttccggggggtcaaaatagctttggcggtcagatgttccgggacgaagtatgtggaagtcacgtcgccggagccgaagtcttcggccagcgccagattgatcagggtttccacgttgtcggatacggtttctgcgggcatgaaagaaaaagcggcttaatattcgcggttaagaagatagttggccagttccaccaggcgggcgcggcgttcttccgggaagatcatcagggcatccagagccgcctgagtgcggcatttggcttcggaacgggcgccgtccaggccaatcagggccggacaggtggatttttgggaattgacgtccttgccggcggtcttgccgagtttttccgtggaagccgtcaggtccagaatgtcgtcaatcacctggaaagccagccccaggttgtaaccgaagtccgtcagagcttccagctgggactctgtggcgtttgcggacatgccgccgaagcgaagggccgtggttagcagggcggccgtcttcccttcgtacacggtgcggacttccggttcggagagctgcttgtgttctccctccaaatccagaatctggcctccgatgagcatggtgctgccgccggtggctgccagctccctcacgtaatccctgacggtatagcgttccgtatcgtccacctgggcgattacggcaaaagcctccgtcagcagcgcgtctcccgccaggatggcgacgccttctccgaaggccttgtggctggtgggtttcccacggcgcagatcgtcgttgtccatggctggcaggtcgtcatggatgagggaatacgtatgcatcatttccacggcgcaggcgggaaccagggcgtccactgccagtcctccgcaggcctccgccgccgccaggcaaaggacggggcgcattcttttcccccccgcaaatatgctgtagcgcatggctttgtggatggtttcggggcttgcgtcctctgctggcagcagtctgtccagcgctgcgtcaatcagggcgcattgttctgtgatgtagtcgttcagtgattgttcacacatggcgttatggaataggtgcggggtgtggaggaaacagatcagcggttgaccagcaattccgcgatttgtacggcgttgagtgcggccccttttcggacctgatcgcccacgacccagagagtcagggcattgtcaatcgccatgtccatgcgcatgcgccctacgtagcaggtatctccgttggtgctgtccagcggggtgggccacacgccctccgctgggttgtccatcagggcgactccgggtttgccttcataggcgctgcgggcagtttccaagtccacaggtttttcaaactgggcagtaacggagatggaatgggaacggtaaacgggcacgcgcacgcaggtgcatgttaccttgagttcgggcagggaaagaattttacggccttcattaagcatcttaagctcttccttggtataaccgttttccgtaaaggaatcgatctggggaagaagattgaaggctatctggtggggataaacatttttcactacgggatggccgtccactacggcgcgcacctgggtttccagttccgcaatgccgtgctggccgctgccggaaaccgcctgataactggaggcgatgacggttttcaacccgaaacgctgatgcagcgggaagagggccatcagcgtaatgatggtggtgcagttcgggttggcgataatattgcgggggtggttgaaggccgcttccggattgatttccggcaccaccaggggcacgtccggctcctgccggaaggcagaggaattgtcaatgaccacacagcccgttgccgctgcgataggagcgaatttcagggaaatgcctccgcctgcgctgaacagggcgatatccaccccatcaaaggatttttccgtcaattcttctacagtcagcattttcccacggaaagcgacctgttttccggcggaccgggcggaggccagaagcttcagggaacctacgggaaaattgcgtgtttccaggcaggacaggatttcaacgcccaccgctccggtggcgccgacgatggcaacatggggtgcttggttcatgattgttgtcagaaaatgacggatattttccgtccgcccccattatacggcagcccggtcatatggcaatacgattgcaagccttcaggcttaaaaatgaaaaactgtccgagattttacaccccggacagttgttgaaaaacgggaaagatcgcgttttttatttcagcgcttgcggcgcagcatcagcagggacaggcccaaaaggctcagggatgccgtagccggttccggaacgacatcctcagcagtggctgacatggaaaaaagcagattggagttcgtgtttccgccgccattgcgggtggacatcacaatgtaagccgtgtcgctggtaaggggagtaccgctcaagtccacggacagggtcatgcctgtttgaatcagggaagaggcctgaccggtcaactggctgatctgccagccttctgccgtctgataaacgatattgagcgtcgtgaagtttgctccggattgcagcccggcgcagtccacggaaagagtcaatccggtatagctggcgtaatcactggtaagcgttaccgctgttcctacgatagagccgccgtaagcatttctgttgatgaaagacacggatacatcagtatccccggatgcggtgacgctgccgtaaataccggagccggaattgccgtttgcagtagtgccttgccagccggtggtgccttgcaaccatgtgacgactttttgtgcagtgatgacacttccgctgttgacgtctccgaatccagacaatttaaggtttgcaggcagagatgccccttcggctgcctccccatttaggtcgattgctacggtggcggccatccctgcgccgcaacacaaagccataagaccggaaagaaataatgtgttcttcatggttgttcgttgctcttttttattgctgtaatttgccgggctgtcttgaacccgctcatgatgaataaagcggattttcaatccggaagtcaagcgtaaattctgataaccaagaatttgtgccgaactttattgcatcattgaaaacctttttatgcatacggaaagcctgccgaaatatccacccatgcagaaaccgccgccagcttttgagactgctcaagataagtctgaaaaccggagaactcttttccctgaaagctggtacatctgccgggaatgtccgtttcaacagccgcaggaaacagtcccgcactctgcagaaagagaaactcatgcactgttttcggggcatatcggattgaaaatccggcatatcctcactttccatgaaaggcaacaaaacaggctcccgattttagggagcctgtctttaaaggaaagagcggtgcaaacctgctatttaacccattttcccgcgccttccggcagcctgccgtcagagacggggccgtagcgggtggattccgtgttgccccagagggggacgcctacgatgcgtttccaccagcgggacatgctggctcccgtatagcagccgaagctccagcagtcggactgcggcgtgaaaatatcccgccgtatcctgttcaggtccgtctcatggatccattccgtggaaacggccatgatattgttgccgtagtccagcatccacgcatagcagttggaatggccgaagtagtaaaaggattccaccttgtcgccgtggaagcgcggggaggaattcagcgcccggatggcctggtcggcgctgtttacccagacgagcctgattttatacttggaagccaggtccgcaatccagcgggtgtaaggtttgccgtcttccttcccccgggttgcgtaaccggggcggtaaacaatccaggtgattctggcggcaggatcttgctgctggatctgggcgatgcggatggtggaggcccttacgaagttggcccaccagttgtcatgcctgtcaggctgtattctcagcccttcccattgcctgagtgcggggccgccgcacatgacgacgtgaacggcccgggacagtcccgtgccgcccagcaacagggccagagcgagaaaaaggcgtgaaagcatgcccgcaccctacctttgctccccgtatctgtcaatccggcggagcgttttttgcgggaacagacgcgcgtgaaaagacaagggagggttttcatgtcccctcagcaattcaccacgttgacggccaagccgccctgggcggtctccttgtatttggattgcatgtcccttccggtgtccagcatggtgcggatgaccttgtccagcgggacaaaatgagcgcccgtgccgcccagggccatgcgggcggcgttgatggccttgatggcggcgatggcgttgcgctcaatgcagggtatctggacgaggcccgcaataggatcgcaggtgaggcccagattgtgctccatgcctatttccgcggcgttttccacctggtggggtgttccccccaggtactccgcaagagcggcggcggccatggagcaggctacgcccacttctccctggcagcctacgtccgcgccggaaatggaggcgtttttcttgtacaggatggcgattcccccggcggtgagcaggaagcgatgcacggcatccggatacggggaaacgcagaatttggtggcgtagttaagaacggccggaacgattcccgccgctccattggtcggagcggtgacgatacgaccgccggcagcgttttcctcgcttacggcaatggcgtacagattgatccagtccataatggagagagggtctttcaaggccgattctccgtgcaccagaagattcttgtgcaaagttttggcccggcgcggaacctgcagaacgcccggcaggttgccgcgcgcgctcatgccgttggagatggactgcttcatcgtcgcccagatcaggtccagtttttcacggacttcccgttccgggagcatggcgcattcgttcgccatgacaatggaggaaagagggcatccgcgctcatcagccatgtgcagcagttcctccgcggattcataaggaaaaggaaaggtttcccgatccctttcttccggatgcagaagttcctgttcggaagagacgaacccgccccccgtggaataaaataccgcgtcttccaccgggtctccgtcctggttgacggcagtgaactgcatcccgttcggatgcaggcgcaggggctggtagtgggaaagatccaggtcgcgggaaggagagaagcggacgtttttttcttctgtgacggacaacgtttcctgctggtgcaggcgggcgatttttccgggaatgctgcgcggctccaccgtatggggttcttcccccagaagccccagcatgatggctgtgtctgtgccgtgcccatgtccggtggcggccagggagccgtagcattcgcagcggatgcctgagatttccgccaagcgcggggagtggcgtatctgttcaagaaagcggtgcgccgcccgcatgggccctacggtatgggatgatgaaggacctatgccgatgctgaaaagctcaaaaatgctgtaatggtgcatgtccgttttcctgtagcggggaagggccggaaatcccgctgggaattccggcccgttccgaaagatgggtttacagccccagcaggtagcgttccgcttcaatcgcggcgctgcagcccattccggcggaagaaatggcctggcggtagtgaggatccgccacatctccggcggcgaacaatcccggcgtcctggtcgccatcatccctgtttcccggataatgtagccggcatcgtcccggtccaccagatcccccaggaaagaagtgttcggcgtgtgcccgatcgccataaagacgcatttgacgggaagttccgtttcatccccttctactatgtccttcagcatgacggcttccagttctcccttgtcgtccgtcttatagcttacgatggtggaattccacatggggaaaatcttttcattggacagcgttcgttccgccatgattttggaagcgcggagcgtgtcgcggcggtggatcaggtacacccgggaagcgaagcgcgtcaggaacatggcttcttcacaggcgctgtctcctccgcctaccacgcacacaggcacgtcccggtaaaaagctccgtcacaggtggcgcaggcggtgagtccgtggccaaccagcccttcctctcccggtattcccagatagcgggcggatgctcccgtagccacaatgatactccgggtttcgtaattctggccgctggtcttcacggtgaacagtccggtggcttcatccctgacgacgctcttgacgtcctcatatgcaaaccgggtgccgaacttttccgcctgctgctgcatcaggaacatcaggtccggccccatcacgccgtccggaaagccggggaagttttccacttccgtcgtggtggtcagttgtccgccgatttgggaacccgtgatcagaagcggagagagattggcgcgggcggtgtaaatggccgccgtgtaaccagcgcagccggcaccgatgataatgacttgttcgctcataatagtatatatgtccgttgccatggtaaagggcccgtgcccgttttgcgagtagattttgcgctatgcggagacaatgcagcggcctgcaatccggcggttgcgggacgggttccggcagtggcggaaaagagctgcctgcatgtatccctggcgacggtctgcaatattctggccctgtctgcgggaagattgctcagccgcgtccctttcaaggacaagcggcccggcaggcccagcggagactttccgaataacgtgaagtagattacgcatgccgtcaggtagctcccttcctccgtcgggtgccggccgtcagtctggtacagctggatgtcaggatggcgtttgaggcaattctcccaggcaatgcccacgggggcgagcgctgctttttccctccgggcaagtttcaaatacgtttcaagaagagccttttgctcctgcgggtccggagttccggaagctcctcttttcccccacgtcagcatcaggatgggcgttcctttggcggctcgtatcagagagcaccatttttctccgaactccatggttcgttccggagcccggataggtgtggcgctttggtcctggagaataacgaagtcccatgccgtgccctccatgttgctgcgggcacgcctgtcattccaatgggactggagggatgctgccggagccgcgtgcatgtgcacgtccggctgcaatcctttggtgtctgccatggctttaaccatggcgggcatgcggttgaaaaacgtatagctgtttcccagaaagagaatacggctgccggggcgtgcaggaacacagcacggccaggagggtgatgcgggcggctcttcccgggcctggagagggagggggaaagctgcccaggaaaaaatcagcagcaggaatatcttggcgggcggcatcatggctttagacgggttcccatgtttccggaataaaatttcaaatggaattcatgacgtgagcagactctttctatacatcaggtaaaagtaaattcatagagataaaagagaacatggaatgcctttgtttcggcatcccttgtacggatgccggggctgccgtcagtcccggcaggcagacggggatttccttgtctccgtatcgccgcgcgaaggtatttttcttccttctccttgattgggaagcactgcatcaattgaagcctgaacaactggttgtatgactggggaagactttccggaggacttgccgaaaggagacgggtgtggttggatatggttcatgaagtctgagccgctgaccaagcgccgtgtggcgggtgtggatgatccgctgttcctggattctctggatatttaccggacaagctttccggtgcatgaacagcggcggatacaggatttcccgttggcgtttcaagaccccggtttttgttatgaagtatttttaaatggggaaggccgggtggttgcgatgctggtgacgtggcgtcgggaaaaattcgtgtatctggagtattttgccgtggatgcctccctgcgcggccagggcgccgggcaaaggattctggaagaattgagggatgcgtttccgcacaaggttattttggaaattgatcctccggaggacgggatctcacgtcggcggttggggttttatcagaggcacggctttgtccccaatccgcagtttgattatatccatcctccttatacggatgagggtgaacctttcccgctcctgctgatgacgcatggagatttgctggatgaggagacataccggagctttgtggatttccaccatcgccacgtagtggcgaggtgaatgaatggccggggaaaatccgtgccatggggggcttttgccgatatgagcctgtaggacatcaggctcatgttgcggttttgcctgtttgtagaacgcccctgagtctgtattttctgaatcagaagagccgttccgcatttttgggagacggctttttgaaaaatgcagcgggttgggatacaccggaagactcagttccatgcccggtccacggcttccctctcttccggggcaagatatctggagagccgctcttccatgcgcagcctgtattcgggaatactccaggaatggagcggctggacggcggaattggtgaattgccaggaggggacgggaacgaccacgtccagcacttctccggctctggagggcatcccggccagtaccgccgcaatggtggaggaaagctccggatgttcatccagaatatccagcagccatccgcagcccaggtccgtgggaatggcctccgtttcggccagcaggtccgcgaggcgcccgggagagagatttttggaaatgaaagacagataaggggcaaaccgcatgtctcccaggctcatcagggcgtccagcgccggagccatggacgcctgtccggggcagggagaggcgcagatgacattcgccaatccggcaattccgggaaaccgctcctccggctggggcgcggccagcgtataaataaggaaagcggattgcctgcgaatatccggcgcctcatccgccatggcaaaaggcagcagggccctccatccgtcccctttgcgctgccggataaaagctgccagttgcagagcacatttgcggcgggcgtccggagcgcagcgggattggaacatattgtaaatggtgacgccttcttcttctcttcccgtttcattgcaggtgaccagcccgtaggcaatcatggccagaggccattgatccgaaccgatttcctccctgcgggagggatccgtgacgagggcggcaagccgcttgatttccgacaaagagctggtttgatcctgaaaaaggcccatgcccgcatgatagccggaggcggaaacctgccaaggaaaaaccgtggactgcttacaggaacccggagttttccggtgaacgctgttgaggcatgttgttgagtgtgaccggcgttttatcctttatttattggcattccggctcacgtccggacaggagttccgtattttttgatgaaattttttcctgtgttcttccccgcttttcccctggtagaggtaggcggttttggagttgtatcctgccgttcggtcgatgaggtcgagaacctcgccgtctccgtatcccgccttcctgatgtatttgacgacttctccggcctggtcggggaagtacttcaccagcatggggatgaatcttttctccataattctgataacataagtgtcaagcatctgattccttgacgaaaatgtaaccaggttattccatttgtgagtccattcgtaatctttgatgtcatttccaatatccttggctgaagcgtccatttcagattgatgttttatgggagaaaagatttcatgatatagtgattcctcattcttgtggaaattcttgatatgcattttttttatttttttaataatgcttgaaagaagggatatattaaaatgtatcaattttcttttactgatctttaatgttgttgatagttgatttatatccataagggaaatcgctgtgctgattcttgctttgctgtaaatatcattatttttctcgtttttataaggccatggttgatcactggtgtaatccggagcttcatacatgggggccccgcctatcagataaaggctccagagcatgtcgcaggcttcttctcgtgtcatcacgccgtcatgttgcagtttgttgattgcggtcagaaccgttttagcgtgctgataaaatgctttcagatcattttgttccagcaggcttttcaggagcggagcatgcccttctgtacttctccggatatggatggaatcgggcggcatgagttcatgatcgaatgaatgtccctccgcggaggaaaggctccatccaaggcagatgaagatgattatatggaaaacgtggttcaccgtcttgtccgggttgtttttcctggttgggaggaggcagatggcgcaatgaatgaacgttcggcgtcactctctgctctgtttccgttgaagctttttcctgtgttcctctccgcttttcccctggtagaggtaggcggttttggagttgtatcctgccgttcggtcgatgaggtcgagaacctcgccgtctccgtatcccgccttcctgatgtatttgacgacttccccggcctggtcggggaagtacttcaccagcatggggatgaatcttttctccatgattttagagacatagctatgatacatgctgtttcttgacgaaaatgtaaccaggttattccatttgtgagtccattcgtaatctttaacgtcagagccgatgacattcccgtccggattggcaggatgggaacgtattattgcatctttcagcgctgtctctttttttccgaaatcagggatgtgtagagatttcagccttttaatgatggcggcggcgtaagcggcatggagatgtttcagccgttgttcgtggatgcccaggttgcgcgacatctgtttcgtatccatgatggagagcgcggaaatgactcttgatttggcggcaatgtcgttgtcccgctcgttttcataaggccatggctgaacgctgtcgtaatccggagcttcatacatgggggccccgctgatcagataaaggctccagagcatgtcgcaggcctcttcccgcgtcatcgttccatggcgccgcatggcgttcaattctgacagaactgtgtttgaacatccatagaattgtttaaaatctcctgattttaaaaattcttttaatttttttgatttttctcccatttttccgcgaatatggatggaatcaggagccgggagttggcgatcaaatccggtctcttcccccagggaagttgaacatccaagatgtatggcggcaatcgcgtaaataaaatatttcatcatttttttaggttcatttattttgactggttgataaatacgtgcttgttatttttttctgtggacctgctgacggaacagttgaatttggaaaccgtcgtcgtagctatttcgttgacgacgtcaatccagtcgtaaaaaaaatgctgttcaacagtctgaatggtttttacatctttcccgtcgacattgatgttccagtcgcaaatccatttatgagtttgaggcaagtcgtagaattttaattttgcaataggttctcggcatccaatgttgtcagatagcctgtttttggtgtcaaggcgtactggtgcaggattgggatcatgtggggctgccaggctgccttcagccggggcgggaacgcagcccttatcccgttcaataatatggacatttcgaaaattcacgcttatagggaggaacgttaattccaagacagctgatgcccctgccatttcttgatcaccatcctttggcagatcaaaataaatgactcctcttttattaaaatccggatgatttctgtcatatgatttccgtaaatgttttgcgctgatcccttcgggaacaatggatgataacgtgattttcgcttctcttccttcttccgtgactgctttaacagtaatgtcgcctccttgggagaggtcatttctaataaccaatgtttgaatgacagagttgtcttcctcttgaaaagaagccagattttctccttcttcgattgtccattcgatctgggatgggtctccaatgagctggggcttgtctgaaaccagggttaatattactgtttcacctatgcccaatttctttcttttttgatcgttctctttctctttttccggtacggaacctttttcttcttcttgaatataaatttgggcagagtattctgccgcctgtgattcgatgcgcaatacctcatttgccagtaaaggcgctgtgaagcagaggcccagcagcatcatggcgagatggcgttttgccggcattcccggggataagacgtatttttggaaaaacggggaggatgcccggatgatggcgttcgcgttcatgttaaaattttctgtgctggttaccggttctgccgcaggggcgagactttattgccgctgattttgttgatcaatatttccccttgatgctttaattttttgtcattccatatttccagcagacggcggtaggttgccacatagtatgtccgggtctgttctcttttttccaatgccgtgatggcgccttccatcatgccggcggagtatcttttcattttaggcgtccatgaggcattgttccctttcctggcccagacggaaagatgcttcccgatgaatccctccctgtatttgattatcttgccgatttcagggcaatccgccacgagtttgttccagcacagcctcgtgaagagttcctctgccgcgggagaacagtcagaatccaggaaacaggcgtacagttcatagggattgaccttgctttcccggattttgagtatgtttaccgctgcatgatggaggaggttgtgttcatggggcatggcctgcgccagttctttaagcagggtgagtttttgccggtcattgattcctttggccttcatgctcaggtaacgacgccatgccggataattaaatgggttcatcttgcaggcttctttcagcaacaattcccgttggacgggacgcggagagcagtcagataaaaccgtcatcaggaaggattcttccgccagaccgtgatgaataaaggcattgtaagccgggatgagctggacggggccgttccagggtatctggctttttcccgttgaccagttccatccgctgatattgttgccgattttccagtgtccgccggggtgtttccagataaaggcacagtgtcccggctgcccgatggcccacgcggggacgcctttggctctcagaaagcctgccgctcctttggagacggcgccgcacacgcctccgtattccgtataaagctttaatgtgaccggtttgtggtcgtaaaaagcggctccggcatgaacgctgactccttggaggtttttcctgcgataggggatgaaacccatgaatttatttccagcctgttcgggagggatctgttttttctctatgaactgctgggcccaggacaggtcttccaggctctctctgccacggaaaacgatggcccattcccacggctgcatcgtgtccgcctggggatggcatgcggattggaagtaggattcccggtaaaaattgaatttggacaggcattcttcaggagggatgacatttgaggcaagccctgcccccagagccatgctggtttcaacggggcggagcgttttattgttcgcgttccagatgcggtaaaatatggatagggtttgtttgccggctgccccggatagggcaagcattctgaagacttccgggtgggtggagagccatttcctgaatgccccgtccttgagttcatgctgcgtgaacggttctccgttttccgcggtgctgaaaaattggtacaggtggcataacagggcgacttgcggggcgtgtgccatggcccggattttatccgtgtcaaggtttgcggttcccagtttcctgcacagaatatcccgggcttttccggagatgaacgaggaacgttcggctgaaagtagtgtctggatatccggttcctgcgctgacgcctggataacgggaaaggctgccagggggagcgctcctaaaaggagaatacggaagatattattcatgggagatgggcggaattgtatccatacctaatataatccatcatatggcaaaaagatgatgaactgtcaacggaaatatttttattttctgggaaaatgattgaacgaagaatcaatggaaatagaaacccagtgaatgaagaggcgccgcgaaaccatgtccgcccgttgaatggaggcatcaaggacggatcaggttttccatattgctttggaccaggtcaaccaggttgttgacggtcatgcccagttcctgcgccgcgcgtcggtaaagttccggaagggtttccggatgcccgtccgattccagcgccagccgatggagcggtatggaggtaaggagtcccggacgttccatttcccgcagccctacggaaagaagccagtttcccgaaggaagttccgtgccgggatgcagtgcccccgtccagccgtgcaggacaatgttcaaacggggatattttttcagcatttccgccagcgtgccccatgcgcggcagcagtgcagggaagcggggcggtccagacgcgcggccagttccagatgccgttccagcgcttccttctggagaggcagccccgggatgccgcgccggcatttgtccagccccgtttccccaacgcccgcatgggggattttttgcagaagggattccagcctgggcatttcctctttccattcagccgggttcaggaaccagggatgaatgccgaaaaagggcgtaacgtgttcatcccgttccgccagaagggccacctgtttccagtccgccggggaggtgccgcagatgaaccgcggcgccgtgccggaagcggctgtagaggaatgggtgtgggcgtccggcagattcatcgttgcttaatgggacagagatggcgcgtccgacggttcaatgatatcaaaactctgtttcgccaggcgcacggcggcggcgcccgtttccatttcatcatggatgacgttggtgatgcccgcgtgatgcagggaagccacttccgaacggaatttggcgcgggcaatcaccgtgatgtccgcattggctcccttgatctgcatgtaggtggacagggccggggcagggtccgggaatgtgaaggcaatcagccgcgcggtacggacgcccgccaggtccatggtgatttggtgctggatgtctcccagaaaggccagatggccgccgttgagcagggatttgacggtgtccgcattcaggtcgataatgatgcaggggatgccgtactgggacaggctttcatgaagcctcctgcctacggggccatagccgcaaatgatggcatggttcctgatgccttccatgcgtgtgatcagggtttccacgttgaggcgttcccgttttgttttcaacccgggaatgcgcaccagcagcggggtaagtttccgtgccgccttcatcagcagcggagtcatgcccatggagacggcggcaatggcgtaaacgttggtggtcaccagcgccgggatgggggatatttcctgcatgaaagggatgagcaccagggaaaattcccccacattggtgagtgcggtggaggccatgatgcccatgcgcccgggaattttcaggaagcttgcggctgtaaggcaggctacgaatttgatcgcgaggacaaaggaggcgaaggttgccacctggccgatgtgttcccacagtccatcaatgtcaatcaacagcccggcggaaacgaagaagatggtcaggaaaaggtccttgaaggggagcacttcgctaagaacccggtggctgtaataagagctgctgacgaagaggccggcggtgaaagcgcccagggcgatgctcaggcccagcagactggcgagcatggcaattcccgaacagatggcgaacaccatcagggtgaagagttcccggcttttggtccgggcgacggccagcatgatgcgcggaagcaggtagcggccgatcagccaggcggctcccagaaagacaagcccccgcagcacggccatgccgatgttgagcgctgtttcccatgagtcgggcgcggcggtgaagatctgcggcatgattgccaccagcatgatggcggcgatgtcctggaacagggcaattcccaccgccatttttgccccggaggttccgctcaggccgaattcctggaaggatttcagcgccaccgccgtggaggatagtcccataatggccccgaccgtcagggagtggctcatgtccatgcctgtggcgtaatgaagccccaggccgaaagccgcagtgcagatgaacatctgaatacctccgccgaccagagcggttttccgcaggtgcttgagttcatcaacggaaaattcaagccccagcgtgaacatgagcaggataattcctacctcggaaagagcctggatgctgacgtcggaattggggatgtggtccagaatgccgcagttggccagaattaccccgcagatgaagtagcccgccagcagggactgccggaagtgggccagaatgagggcaatcgcgatgattcccatgaagacgacagtaagcagaatgaagaatggaggcgcgtcattagggcctccggaggccagcagagagagaaccatggcggtcaggtcgggaagttagggaatggttatgaggttgatttccggcgggcagttgaagcggcccggccctatatagcctatgccgcgggtgacgaatacctgcttgtcctcataaggatggaacccggagtgcatggtttccccttccgacgccaatagcggggtggaaaagaaaggcagtttgatttggcctccatgcgtatggccggagagcatcaggtcccagcggtaatttcccagcaattcccttcctttggggttgtggctcaggacgatggttggcatgggcgagttttcctccaattcgcgcgggctcatgcaccggtccgggaaaaagtcaccctcccgcaggtctcccagccccaccagtttgaattccacgtttcccagcctggggatggagacgaaggcggcggaattcctgagcagcgtgaagcccccttccttcaggacgcgttccacattgtccgcaagggccatgtcatggttgcccagacatgcgtaggccggggcgacggaggagaggcgtttcatctgggtgatgtagtcgcctgcatgagtgacccgcagaaaatccgtgtacagatctcccagaaatacgatcatgtccggtctggcctgttccgctattgttgccgctttttccagcaggggcagattggtgtggatatccgacaataccaggatacgaaggccggaaaggccgggtacacatccggcaggggccgtgttttcattaaattccagatgattggcttcccagtgcatgtaggaggccagcagggaccccagcagaatgaccgccgcggccgcatacaggagcttgcggagctgggaacgctttttggagaaagggtgggtggtcatgatagggaggggttgagaatggccagttccggcagggtgaataatccgttgcggcgcaccagcttcccgtccaggtaaatatctccgcccccggccgcttccgtctggatgcataccatgtcccagtggatgcgggactggttgccgttgtccgccacgtggtaggcctgccccggcgtcaagtggaaggagccggaaattttttcgtcaaacaggatgttgcgcatggggcgtgtgatggccggattgacgccgaaggcgaattcccccagcctccgcgcgccggggtctgtgtcaagaatggcgttgagctcccctgttttatctcccgcttccgcatgcacgaccagtccgtttttcagcgtcaggcggatgttgtcaaaggggattccctggaacaggctgggcgtattgaaggaaatgtggccgttggcgctgtcgatgacgggggcggtgaatacttctccgtcgggcagattgcattcccctgcgcacgggatggcaggcagccctttgatggaaaaggaaatgtccgtacccggcccggtaattttcacatattcagccttttccatcatggcggccagcttccgcatggcgggacgcagggcggcgtaatccatcaggcaggtgcggaaatagaaatcctcaaactcttccgtgctcatggccgcctgctgggccattcccccggacggccagcgaagcccgcaccagcgcgtatggcggatgcgccgctgggagacggggttcagggctttcatggcggcggccatattttcctgtggaacggaggacagttcaaaggcgttccccccgccgcgtatttcaatgtaggcgtccatgtcctccatttccgccaggcggtggcggccgatgatgccgtattgttcttccgttgctcctgagagcatttcccggttcaggcgggactggttcaggcgcagaaagggcattgctcccgcattcctcgcctcccggatgagggctattcccatttcctccggaatatccgtcagttccagcagaaccctgtctccggggcgcagggctgtggaataccctgcaagctgggctgcaagggcctgaaaacgggggtctctcatgtctttattaggcaaatacggcagcctttttgtcaagccggagacttgccacgggcaaaaaactgtggttttatcccccggatgtccagattgcccaagttaggaatactcggttccggttccggttccaattgccagtccatttatgatgccatccagtccggttctctccgggcggaaatcgccgtggtgatgtctgacaatccggacgcctatattctggaacgcgcccgttcctggggcattccggcggaggttattgactgcgggggatttaaaaccagatttccggaggaatcccaggcatccgttgccgcgcgcctgaagcaatacggcgtggactgcgtgtgcctggcgggattcatgcgcctggtgaaacttccgctgctgaaggaattcccttcccgcatcctgaatatccacccttcccttcttccagacttcccggggcttcatgcctgggagcaggctgtgaacgccggagctgcggagagcggctgcaccgtccattatgtggatgacggaatggataccggccccatcctgggtcaggctcgcgtgcccgtgctgccgggggatacgccggaaagccttcacgcccgcattcaggagcaggagcataccctttatcccgccatgatcgcccgcgttctggaaacgctggcatgacctgattctccttctgaccggaaagcaatccggcctcctgccgggagaggatgacaggatgaccgattctcttgtcttgtgatatgaacggaatccgttaaaaaggagtcctcttttcaaagaaaggataaaaataccatgaagatgaaaccttccatcgccctgtttgccgcttccgctcttctggcgggtgtggcaggcgcgcaagaaaaggccgccgaagctccggcagccgaccaacccaaacaagagaaagaaattactgtgtctcccgaacagatgaaaaaggacctgggctattttctgggtttccagagcggtcagcaacttggttccattcctaccctgacctttgacgacctggaccaggaatccttcctgcagggcatcaaggatggcatggtccgcaagcccgccaaggaccaggaacagctgaaacccgccctggatgcgttccagaagcaaattgacgaacgcatttccgccaaggccaaggccaatttggaggccagcaagaaattcatggaggaaaacggcaaaaaagaaggtgtcaccacaacgaagtccggcctccagtacaaggttgtgaacaagggcggcgaagaaaaatttgatgaaaagaagttcaagaaccccatgttcaaggtgaagtacaagggcacgctgctggacggcaccgtgtttgacgacaccaagggcaagtccgtggaacttcctctccaggtcatccccggttttgccgaagcgctgacctcgatgcccgtcggctccaaatggattgtctacattccttccgagctggcttacggggaaaacactcccggcgctccgattgaacccaattccccgctcatctttgatctggaactggacggcatttcggaagcccctgctccccagggaggccccatgagcatttctccggaacaacttcaggagatgcttaagcagagcggcgcccagcagcagtaaggaaaaaataattcaagtcagggccgttcccgggagggagcggcctttttgtttctatccgtaccgctttcatcaggaaagcgaatgggcagactgggaatttataatcctgcttcttttcttaatctatgtattttacttgtaatgaaagagtgatggttttgcttctctggatatgtaggcggatatgctggacaggtggagtttattattttccattatttatttaatgcgagtcatttctgaaaatagacttgccaacggattataaatccgggtattactggtcacaatatctttgatcaatatgagacttcatctccctccgtccttgcgttccgcccttctcgcttccctggtttccttctccggcatttactcttattcccatgctgcaacctcggcggatttctggcagatccccgattttggcggtcctgattttacatggacgggggctggggaaggcgacgctgtggggacggcaggcaactgggagggaggctcggcgccgtcccgcgtggacaataagggtccgcatttgatttttaatggcgtggatgtgacggttacgggaacgcctcccaatacctcggacggaggcggtatttccgttacggggaacggaagtgtgtctgtggggcttggacaatggggcggcaatgtttacgtggaaaagggttcctcccttaccacttctttcggtacccagctcaaaaatatggagccagaggggcatgccaatatctatgtggacggcactctgaacatgacgactccgggagggaatctcaattttgacaatggtaccggtgccgataatcattactggcatattgggcttgacggaatgatcaacctgtcaaacaccaccacaattaccaagaacgccaaaacatggaatgtggaggtagtggttgccagcgccatggaagggcttgcggtcaccaatcgcgagatggttgacgacgccctgatcacacgctatttcatgtctacaggggctgatttgggggcatccctggattccctgcgtatttggaagcaaaccggggatgatgcttatgaggcattgacgagggttgattccgccggccagctgggggcgggtaatttcctgcttgtttccaacggttccggcatgtccgtgcagtacaagggggaagggtatgatgcagaaactctggtgtggaattccaacgggacatggagcaatacgggaacgggctggtacaagcagggtgacggaaccaagacggatacttccttcctgaatggggatgccgttatcttcacagcggcagaaggctccaaaacagtcaatttctccggagggctcaatgtctcctccatgacatttgagacggattatacgctccttcccggggaaggcgctactctttttgcccaggaaacggttttaagcaacggctcgtccctgacgttgggtgacggggatcaccgtttttccggttttgaaagcctggtgacgggaggggaaaattcttccctcatggtttacatgaaaacggaggcttcttctgcgggaagcgtcaatttgctggagggctcggtccttcagaatctttacgtatatggagccttgagactgggtgcttcttcccagtcgggatcatggatgcttggcggagccagcctgcatatgatggcgggttctaccatggtgttcggttccgatgcggggacatccatcggagcggggcaaacggtaatcgcggagggcagcttgaatgtctatgcgcagaatgtttccgacagcaacacgtatctctggaacctggtgggcggcgagagcgtctcgactggagatacgctgacctttaacgggaccagcaatccgaccgtagcagggaatatcacatacgccgggaatatcgtatctggcgcccagaccggttccacggtgacgtttacgggaaatatccaggcggaatcgttcaaggtagcccattattacggcagggttcatatggccgataatgaattggaagttaataaactgtgggtcggggccggcggtgggtatgacaattccttatatggtgctcttgatcttgattccggcaatgtgactacggcaggccaggtccggcttgccgagctggggcatggggtgcttaatgtgaaccagggttcctccctgactgtcaccggcagcaataatacccatagcacaagcgccagtttcctgctggctcactgggcttattcaggggaacttaatttgaggggcggttctttgactgcattgcagtcctcgatgcatctgtcctgggatggcactggcattttcaatgccgcgtccggaacggccaatttgcagggaatggacttttgggcttccggaagcggttcattccggggcagtttcctgttgggcggcgcaacgtccggggatgccagggtgaacataggttcttcgggcattgccaatgtggcgggagcggccgttatcaaactgggagaaggcactctgggggctttgtccaactggggtataagctataatccggatttcacggcatcttatatagaacttctgggcacggtgaatgggactatccttgacacgctggatgccaatgaccatgccacggggcgtactgtgactttctccaacgggctgaagggagacggtaagctcgtgaaggttggcgacggggttctggttcttaacggaacagcccaggccccggttcctgccgaaggagaaacagcagccgtccccggctttaccggaacagtggaattgagagaaggcggtttgacggtgaaggattccagcgttatagggcagggggctttgctgatcggaggcggtcttactgtgaacgttacgtccgcggacgggtatgtgctgaatgccggttccacgctgggctccacgggaatttccggaggaacggctactttatccgccgggttgacgttaaacggcggcaccctgagcttcagttctcttgattcggagacggcggccctgaccgtcaattccatcagcggcagtgaggctacggaagtacggctggggctgtcttccctggaaacggggattagttatgccttgctttccggagcagggttgacggaaagttctttctttactttgggcggagctgctgcggagttgtacaatggaacgttttccgtcagcaacggcactctttacgtcaatttgagtgacaaggaaggtttgttgaggtggaagagcggcacctggaatacggaaagctcgaatacttcctggagccttgacgggacaccgtcagcttataccgacggggagaccgtatatttctccaatggcgatggcgtggataaaaatgtgacgattgcggggaatgtcgctccaggcagaatcaatgtttccggtacggatttcatttttacgggtgacggttccattaccggggatacgacgctgaacctgctggacggagcttccctgaccatgaacaacgccaactcctatgccggggataccgttcttggcgatggcagcaaactcgttgtcggcaatgccggagcgctgggcaccagcacggtcctgttgcagggagattccgttctggaactgaccacggggacgtggaacgggttgggaacacgtttgaacgtcaattcctcaggcacgctgaaattgagcgggaacgcctccggaacgacaacggccgccctgactggagtcaggtatgagctgggagccaataccacgctgaccctttccgccggaacctatggaaatacgattaccggggccggtacgctgatatccgcggtaggaacgaatgtccttaatggaaatgttgatattacaggagagtacagggtgctggcaaccaacggcacggcatgtacctggacgctgggggccggcgcttccgtgacggcgggaagcttcatcggccgctacgagtacaatggaacaaccacgctcaacatcagccgggacgccgtgatgaacattaccggcacgctgcgaattgcccgtgacggaaaaggcgtcatgaatattggttcgggcggcatggtgctggcccagacgctggatttggggcagaactgggatggagtaagcgccaagggcgccaccattaatctgaatggcggttccctgcttctcggttcaggcggcatgacggcatccggaaataccaatacgattgccctgaacatgaactccgggacgctggggacgacggcggcggaaggctggtcttccgcctacaatatgtcccttactggaaatgtgacggttgatacccgccagtatgatgcggaaaccaagtcctaccatgaccaggcttccaccggcatcaccctcggaggcgtcctttccggagcgggcggcctgacgaaaaccggcttaggcaccttgaccctttccgggcagaatacctatacgggcctgactaatgtccaggccggaacgctggcgtttacgaatacgaatgccatggccctgggcagcatttccatgggtgcgggcgccagaatgacgacggcttctgctctgacgctgaatagcggcgctaccctcacttttgacatgacgggcgtggtggcgaatgagcctgtcatcaatatcacggccgggttcctggctcttacggattcgtcctgtgcgctgactatcaataattatggtgaattggaggcatctaactatgtcctggcccagtgggctgcggatggaagcctgacgacggattccttcacatggacgcccgacatcaccagggaagggttcgaatattccgtggtggtggaaaataaccagcttgtgctgaaggttgctgacgtcagcggggacaatggttttgtctggaacggaggaacggaccggaagtggatcaacaccagtgttgacggctggacgacgaggctgacgggggcggatacgctggataatcaggaaatttacttctcctccgcggaagcgggtgaagtcaaggtttccggcattgtaactcccaagagcgttgttttcaacagcggcgcttacacgttggtcagcgatcctgacagcgaggggtctattgcggattccacagctcccaccacgcttaccgtgaacggtacggctgaagttgccttaaacctggccaatacctataccggagggacgatactcaatggcggtacccttaccattggcgctgacggagcgctgggaacggaaggggatattatattcaacggggggacgctggcctatgcggattccgctgccggtgaggatgcgacagggtatgacatttccagccgtgtcaacgtcggagacggaggtttcctgaacgtttccgtgcttggcgccggggataccgtttcctgggccggcttgtcagccgatgtcatgggggccggcactaccctgaccaaaacgggagcgggcacgctggcccttggatacgcagggaataccttggcccaccttactgtggaagagggcacgctcgctttcacgggcggtgcgactatcggcgtaaatccgaacaatgctactattgtccgcgtcagtgaaggcgctttccttgctctttccggcggaaccgtcaacctgcatgcccagctcaatggggcgggcaccgtcactatcgggactgcggatactgcgggactggtcaatatctccaatacgggcaataccaactttactggccgcctggaactggtcggcaacggggtgaatatgaataccaatgccaactgggtagcctttggggcaggaaatacgctgggaggcggtaccgttttcatcgacggcaagggcttccatttttccgcgggtacgacggcggccaattttgaaatcggcgcaacccacggtgcgatgcagaacggctcctccggcgccacatacactttctccggaaacctttccggttcgggtacgtgggccatggctgcgaacgttcggatgaacaatgtcctcacgggatccctcaaggacttctcggggaccctgtccaccaatgagacttccgccaacaacaatcgccaggcctggaacttcggttccggcggggggtgcgccacgggtgaagggaattccgtttttggagacggcgctattctgggaggtaacacggggtccacggataccgggctggccgcacaatacaacgtcaactacaacaatacggaactggtgttgaacgctctggtgcagggcaactccagcctgacgcacgcaggcacgggcactctgattctggatcaggccaataccgctacgggagcgctcggcattacaaatgccggagccgtagtccagcttggcacggaagacaaggccggccagtgggccggaaccgtgctgaatggagtgggaacgctgaaaatcgtcaatggcgcgctgacctccgccatgacgcgggcggaaggcgccacggcagccattgtcgtggactcagcagcttctgtcaatttgggggggactgacggcagcatgctcaagggcattacgctggctgccggaggcaggcttaccaacgtttccggagatattacggtgggggcgggagccacggaaacattgaatcttaccttgggagcggataacatcaaccaggatgcggccggggcggccatcattgaccagggagacggcaggcttgtcatcaacaatcccgccacagtcaatctgaacattgacgccattgtgaacacgctcgtcgcccataaggaagccggtgcggaaagctggctcaccctgacgaccggaacgctggaatgcgaaaaccttggcgatatccagttcagcaagattctttccaattacggtatccgcgtgacgggcaccgatggaggaagcctggtgctcagcgggcaggtcagcgggctttatatggtggatgattcctctacttccgatcctgataccgtcaccaactacggcacgctggggatgtactccggcgtggtgatttcccaggacaagacgcttaccgttcagttggccggcgcacccggcgattccgacggggacggcgcggtcatcaacaacctgctgggcgctacgggaagcacgctgaaagtggaaaacaccagtgcggacggaggcaacgctgttgtcatcctcaacaacgaacgtctggaaacgggattgcctgctcctgatgattacgccggtgcggattccatcatgggcggaagcattgtcggggaaaacggagtcaccttcgtcaagcaaaacacgggcaagctgacagtcaacggttcttttgtgacggacaccctgcgtgtggaaggcggttccctcgctcttaacggtgaagggaacagctttaatcatgtggaacttgccggcgcagaggaagggagtgttctggacatcaaccggaataccgtcatgggtgatttgacggacagcggcgaaggcgcagccctgaacatcggcagcggagcctccctttccgtcaacggcgccagcaatctttcctccagcaccatccagggcagcggaacgctgaccctccgtgatacgctggaaatttccggaacagcctcccttcagggcggtgttcttcttgatctggcaaaagatgacgattccacgggaacgctcgacctcggttcgacatccggcagcaccgtttccggaatcggcggagagggaacactgaagagcgcaggaggcgttttgaccgtcaataccggtaattcgggcggcggttccgttttcagcggtacgctggagggacgcgggcagcttaatatttccggcaatgccgggcagacgtttgaaaacgtcatgaccgctgccggcagcagctgggcagttaacagcacgggccttctcaatatccggatgggtgggacggtagacaacccgagagccaatacggcgctgaccctcagcagcttgacgctgggagacggttccagtacgaaccttaccttcaacacggactacgctggccccattatcagcgtgaccggaaatatcagcatcagccagggcgcggaaataactctcagttctactggcgggaatgaactgactctggacgcagacggaagttatacgctcatgcacgcggatggcaccattgatctgggaggaagcgacaggctggctatcctgctggatccctcctcctccgctttcaagaaatttgaaaatgatgcgtacctggtgatggaaaacggcaaccttgttctgatggccacggcttccaaggacaataaatatgcccgccttgcggatacgtttaattccagggccggagcagaacttctctggaacctgcccggcgatcttgctgcggattccatcctcaagaaggtggatgacgccgtaggagccctgacgtcttccaacccctcggaagcgaaacgcaccatggcagcagtggctgggagcacggtcaacgcgcttgggacggcacagagggacgccctgcgcgaccagatgggctggatcaggaaccggaccaccctcatgggcgtcaacccggcctacgtcaacgacgacctcccccgcttccacatgtggatggaaggcacgggctcctacgccaaactggacacccgcggggatgaaagcggctaccagctcaccacctggggaggcacggtaggcatggacgcggacctcagcgaccgcctcacggtgggagcggccttcacggccggctacggcgacctgacggccggcgcggcggacagcgccgacgggcacctggacagctactacgccagcctcttcggccgctaccaggacaggcgctgggcgcacacgctcatcctgacgggagggtggaacgacgcgaaactcaaccgtacggtcaactatggggaaggaagctacgggacgcagggaagcaccagcgggtggggctttggagcgatgtatgaactcacctacgacgtgtacctcaacgaaaaccgcagcagcgtgctgcagccgctgttcaacgcctcggtggtgacgacgcggatggacggctatgaggaaacgggtgcgggcaacgcgggcctgaacgtcggcaggcaggactggacgacggggacgctggcgctgggcggccggtggatgggtctggtgggcagcaacatcttcggacgagaagcgctggcggaaatccgcgtgaacgcggcgcaggacctgggagaccggagaggggaaacgaacgtctctctgctgggcaaccccggctttgcgcaaagcgtgaggggagcgaaagtgggaacgatagcgctgcagctgggagccggactgagcgtgcctgtaggaacgaagggaaccatctacgtgaacgggaacgcggacatccgtgacgggtccagcgcgctgaacggaagcatcggctaccgctacgacttctaaaagaaggaaaacacaaggagggggcccccacccccgaaaggccgcctctcctgaacatccagagccgttccggaattattccggaacggctctgttgcctgaggaaagccccttggggcggcccggatgggccaaaaacaaaacagcggcaagaaaaaagaatgcgccgttcccacggaagccatggccctttttcccctcgtcccctcccgtgaaacgcctcatcctctcctcaaatctgtaaaaacgcgccaaatgtttccggaaaccctctccgctgtccggagccgaaaaagaacggaacgcgagcaatagggccttttttatgcgatttcagcgggattttgcaaggctaggccctacgcgcgcgcacgcgatttataacattagtcttgcaaaaaattaagataagcgtaatatatttcggttatgtccgaagataccaacgaggttgttgaaaccaccgtttccacgacggcgcagcatgaatacggcgccgcgcagattgacaaactggaaggcctggaggccgtgcggaagcggcccggcatgtacatcggggaccctgacgaacgaggcttgcaccattgcgtatttgaagtgctcgacaactccattgacgagcatctggccggctattgcagcaagattgacattgtcattcatgtggacggttccatttccatcgtagataacgggcgcggcattccggtggatatccacccgaagttcggcattcccgctgtggagctggttctgaccaacctgcacgcgggcggcaaattcggtcagggtgcgtacaagtactccggcggcctgcacggtgtgggcgccaaatgcgtgaatgccctgtccgactggttcaaggcggaagtgcgccgggacggcaagcgctatcagatcaaatttgagcgaggcaagacggtggaacccctccgcactgtaggttcctgtgcctgtgaagtcacgggaaccacgatcacgtttttcccggatgccaccattttcacggataccacggagttcaagtttgaccgcctgacgacgcgcctgcgggaactggctttcctgaatcccggcctggtcattgaactgattgacgagcgtgaagctccggcgcgccgggaaacgttcttctataaggacggtattgtggagttcgtacgtcagctgggcacgaacaaggaagtgatcaacgaggaccccatttccatttccggcgtccggaaggtggaagtggagtacgacggcaagaagatggaggacgatgttctggtggacgttgtgttccagtacaacaacacgtatgaaacgaacatcctttgctttgccaactccatttacaacggggacgggggaacgcacctttccgggttccgcggcgccctgacgcgcgtcatcaacggttacgcaaaggccaacggcctgttgaaggaaaaagatccctccctgagcggcgaagatgttcgtgaaggcctggtggcggttatttccgtcaagatgcccaacccgcgtttctcatcccagacgaaggacaagctggtgaatacggagattgaaggcgtggtgggcaatgtcgtgtacgaggaaatcaagacgtactttgaagaaaacccggcgatggccaagaagatcatcgagaagagcatcacggccgctcgtgcccgggaagccgcccgcaaggcgcgtgaaacagtccgcaagagcgctctctccatcggcggccttcccggcaaactggcggattgttccgaccgggatcccgcgaagtgcgagctgttcattgtggaaggtgactccgcaggcggttccgccaagatggggcgcgaccgccgcacgcaggctatcctgcccctgcgcgggaaagtgctgaacgtggaaaaggcccgcctggacaaagccctggggagcaaggaaatccagaacatgattacggccatcggcgccggaatcggggaaggggacgatgaagcctccttcaagctggaccgcgtgcgctaccacaaaatcatcatcatgactgatgccgacgtggacggcgcccacatccgcaccctccttctcactttcttctgccgccacatgccgcagctggtgcgcgccgggtatctgtacatcgctcaggcgcccctgtaccgcatcatccgcaggaaaaaggaagagtacgtgcaggatgacgtggccctgaaccgcaaactgattgaactggccgttaatgacgtgactctgcgtttcgcagacggctcccgttccttctctcccgaagaactctccgccattctggaaacgctggtcaacctccagcgctatacggaatccatgcaggcgcagggcggttccctggaagacctgctcagccatcgggaggccaacggggaattcccggaattcctggtgaaggtgcgctgcggcaatgaagaggaaatactcttcttccatgacatggaggccctgaccgccttttctgaggaaaacagggaccttttcatctttggcacgccctcggaagaggagttgctggaaaatccgcttccggaacgggaggggcccagccgccgctccatcactcatgaactgcatgaagccaaagccatcacgcgggccctggcccggctggcggaactgggcattccggggaatatgattgtctccatggatacgcccctgtttgaactggtggagggtgaaggggataaggaaaaagtaactcccctgttctccgtcatggacattctggaatccgtcatctccatcggcaagcgcggggtggaaatcacgcgattcaaagggttgggtgaaatggatgccaaggacttgttcaagacgacgatggacccggaacggcgcgagctgctccgcgtcatcctgaacgacgacaacgccgtcagggccgatgaaatgttcaccatcctgatgggggatgtggtggaaccccgcaagaattacatcgtggaccatgccctcaatgtccgcaaccttgacatttaacccccgcactctctttcagcaccatggaaaataatagaatcaaaccggtggatgtagccagtgagctctccacttctttcctggactactccatgtccgtcatcatctcccgcgccctgccggacgtgagagacggcctcaaaccttcccagcggcgcatcctgtacgccatgaaggaactcaatctgtcccctgggggcaagacccgcaaatgctccaaaatcgtgggcgacacgatgggtaactaccaccctcacggggatgccgccatttacggcaccctggtgaacatggcgcaggactggtccatgcgggatattctcgtgatcggccagggcaacttcggcacgccggacggagacccccccgccgctgcccgatacacggaagccaagctctccggcatgggcgtggccctgatggcggatttggacaaggacaccgtggattttgttcccacatacgacaatgaacacacggaacccaccgtgtttccctccgctttcccaaaccttctggtgaacggcggcacggggattgccgtggggatggccaccaacatgcctccgcacaacctgggggaagtggtggacggcatttgcgccgtgattgacaatccccacatgactgtggaagagctgcgccagtacatcaaggggccggattttcccaccgggggcgacgtgctgggcttttcaggcattgacaactacttccgcaccgggcgcggctccgtgcgcatccgcggcaagatagacatggaagtaacggattccggcaaggatcttctcatcatccgggaagtgccgtatggcgtgaaccgcgccgcccttcaggaacgcattgcggaactgtacaaggataaaatcctgacggatatttccggcatccgtgacctttccgatgagaaaacctgcattgaaatcgagctgaagcgggatgcccgcccgcaggtggtcatgaaccagctttacaagctcacctccatggaaacttcctttgcggtgaatatgctggcgattcatgacaaccgccccaagacgctcgccatgatggacgccatcaacttctatatcgagcaccgccgcgaggtggtcgtgcgccgcacgcgctatctgctgggggatgcggagaaggatgccgagcgcctggaagccttcctgctggccctgcaccacatggatgacttcatttccattatccgggattccaaaaaccgggatgaagcccgtgaacgcctgcagaattacacattctccacgcagacggcggaaagcctgggcatcctgatccgttcccaggcctccatccagggggaccgctacgtcttcacggaacgccaggtgaactccatcctggatctgcgcctgtaccagttgaccgccttggaaaacgacaagatttctggggaatacgcggaactgctggtccgcatcaaggactacctggatattctggcgaacgaatcccgcgtgctgggcattgtaaaggacgaactgaaggcgattaaggacaagtacgccacgccgcgcgtcacgcgcatcattcccttctccggggatatggccattgaggatctcatcccgaatgacacgatgatcgtcaccatcacgcacagcggctacatcaagcgcaccaactccgcggaatatcgcgtgcaggcgcgcgggggcaagggcgtgaaggctgccactaccaggggagccaaaaaggatgcggaagcggactttatcgaacacctgttcgccgcccagaaccacgactacctgatgttctttacgaacaccgggcgcgtgtacgtggaccgcgtgtatgagattgacgaagcggcgcgcagcgcgcagggccgcaatatcaagaacctgctggatctccagccggaagaagccatcgctgccatcctgcgtctggaacgccgggtggatgaaaaaggcaatgacattacctttgcggaaggcagcggcaatgttgttttcgccacgaaggacggcacggtgaagaaaaccagcctgaacgatttcgtcaactatcgcaaggccggcatcattgccattaatctggaggaaggcaacagtctggtgaacgcggaacttaccagcggggccgatgaaatcgtgctcgtcacgcatgacggcatgagcatccgcttcccggaagaagatctgcgtacgcagggccgcaacaccatcggcgttcgcggcatccgcccgcgggcgggggactacgttgtggccctggccattgtggacccgcagaaaaccctgctggtggcttctgaaaacggcctcggcaagcgcacttcctttgatgaataccgcacgcagggccgcggcggcaccggcatcaagaccatgaactgcacggataagaccggcaaggtggtttccgccacggtcgtgtccgacgaggacgagctgatgctgatgaccacggccggacaatccgtccgcatcaaggtggcgactgtgcgtgaaacgggccgcgccacccagggcgtgaagctcatgacgctgaatgagggcgaatccatccaggacatttccatcgtcattcccgatgatgaagatgaagaagccccggcggaaacggaagacgcaggagccggggaagtgtccggtgaaatggaagctccggcggaagaataacatccaggttttcctgctccggcgccatgccggagcagggggcttcatgggccgtttttatggaagaccccctttcattggagcaatgtgccggacgtctggaacggcgtggattccggagttttgtagtgccgggcctgagggaggctgcggaggtgatgcgcggcctggtgcgggagttcaggccgtcgtccgcttcctatggggattccatgaccctgaaggctgcgggcattcttgatgacctgcgctccaatccggacattcagttttatgacggctttgttccgggcatggtgcgggaggagaaatgggaaatccgccgccagggcatgacggcggacctgtttttaaccggcgtcaatgccgtcagcatggaaggaaccctgcactgggtggacatggtgggcaaccgtgtggctccggtggcattcggaccccggcgtgtcattttgctggccggttccaacaagctggtggccacgccggcagaggcccgggaacgcatccgccgcattgcgcccctgaacgccaggcggcatgaagggttcaggactccctgcatgcacaccggaatctgcgcggattgtaattccccggaccgcctgtgcaatattcacatgtccattgttaaatgctttcccaagggaagaatttccgtcattctgatggaagaacccggaggactttgacccatgccttttcaaaaccggatagaaatcatggccccggcggggtcgtttgaatctctggcggccgccttgcagggcggagcggactccgtgtacttcggagtaggaaagctgaacatgcgttcccgcgccacggtcaatttttcggaagaagatttgccggaaatcgtcgagcgctgccatgaggcgggcgccaaagcttatctgacactgaatatcattgtgtacgatgaagagctggaggcggtgcatgccctgtgcgacgccgcccggaaagccggtgtggatgccgtcatcgcttccgacctggcggtgatttcttatgcgcgttccattgggctggaagtccatatgtccgtgcaggccaacgtctgcaacatggcctccgtcaaattttacgcgcagtacgcggatgtggtggtgctggcccgggaactcaccctggcgcaaatcaggcatattattgaatccatccggaaggagggcgtgaaaggcccctccggggagctgctgcgggtggaaattttcgcccatggggcgttatgcgtggccgtgtccggcaaatgccacatgagcctggcggcctacaactcctccgccaaccggggggcctgcttccagaactgccgccgcgcctaccgcgtgacggatgaggaaacgggcaatgaactggtgatagacaacaaatacgtgatgtctcccaaggacctgtgcaccattccggtgctggaccagcttctggacgcgggcgtttccgtgctgaagctggaagggcgcggccgttcctcggattacgtcaggacggttacctccgtgtaccgggaagccgcgcgggcatgccaggacggaaccttttccgcggacagggcggaagcgtggatgaaacggctggaatccgttttcaaccggggattctggcaaggcggctattacctgggcgtgaagtggggggaatggagcggttccgccaacagccgcgctgccctgttgaagatccacattgccagggtagagaacttttataagaagaacggggtggcggccctgttcctggaagccggcggcctgtccgcggggcagaccatcctcataacaggccccactacgggagccgtccgcatggaagtggcagccatgcggagggagacggcagagggcatggagcccgtagaagccgttcaaaagggagaaaccgtctatctggcggttcccgaacaggtgcgccgccgggacaaggtgtacctgctgcgcccccggatgctggaggatgcctgaatgtccggttgtccctttcttcctctgcctgccttttccaaagaccgggaatcgacggcaggatgattttaattttgccgtttcctgcccggctgggccggcggggcgtccggcttcagcaggggggagctggctaagcatgtttctgatcttgatcgccaggcgcggcatcggctcggctatcgtgagggctgccacttcataacgggcggcgatgtcgttgatcagacggaccacctcatggagtttcattcctcccggttccacttccactcccgcgatgatttcagccggggtcttttgaaattcacgtttggcttccggtctagaaatccgaatcaattaagttattcattcattgtctgacgtttgagagaaaatgccgtaaagtagtcttcctattgaatgaaaaagaatttccctggcgtattattttaaaaccgtatgccatgcctgattatatttcctttctgcgtcttttttcatgttcctgcgccttgctgtgtgccggaatgctccacgcttccggtttgcagccctggttgcgggagctggccgtaatcccgcctgcgccttccgcgaaagaaaaggatgcatggatgcggcaggtgtggacgcggacggcggagtatgcggcttcccttgccgagcctgctgccgctgacgattgcggggatgcgatggttttgctggttcccgtatttcaggcgtggccggacgggaaggcagccggtgccgcgctggcggaaattctttccgttcccgcggagagtattggagctgtttcttcctgggatgacctggttaagcatcaggaagccattcaggaacgagtccgtttcctcaggctgaagaagctggcggcctattatgactctgcggccatccgccgcgcggtgaagcgaaaccgggacaagtacggggaacggtacgccggtgcggaaggtttcctggcacggctggatgagtgggagaaggagctggggccgctggaccggtgggtggagcaggccgggccgggacaggcggccctgctgcgggagatggtggatctgcggagaaaagccctgattgaagccctgccggaacagaacggcctgaaggaatgggtgagcgtgcggcgtttcaatccgtccgggaaaagttctttcaatcatgaccgtccggcgaactggcagggtatttccagcatgccggggcccgggcgcaaataccgcagcggcattgtgaaatttaacggggtttcctcttcttcccctgtggagcagctgctggcggacgaccgctgggtcgggcatctggatgttgatttttccggggagaagctcatgttcaccgggaacggattcggcaagaaggaaagcaggccctgggacgtttttgagctggatttgaaaaccgggaaaaaggaatcccttaccgcgcatatgccggcggatacggacagctataattcctgctacctgccggacggccggattattttcgtcaatacttccggcatgcagggggtgccctgcgtggccggggtggattacgtgggcaacctccacctttacgaccgggaaaagaaaacgacccgccggcttacctttgaccaggacaataactggttccccaccatgttgccggacggcagggtgatgttcctgcgctgggagtacacggaaagcgcccactatttcagccgcgtgctgatgcacatgaatccggacggcagcgaccagaaggaatactatggttccaactcctactggcccaacagcttgttcaacgcacggcccctccccggcaggccgggcatgtttgcgggcattgtcagcgggcatcatggagtcaagaggctgggggaactggtcctctttgacgtgaacagggggcgcaccgccacggagggtgccgttcagaagattccggggtatggaaagcccgtggaaaacgtgaccaaagatcagctggttcagggattgaagactccttatttcgcagaaccttatcctttgaatgacgagtgtttcctggccgtttcctccccctccggcaaccagggcgtgaccaatgtggtctggtgcgacatatacgataacatcgttcctctcacggcctcctcctacttcgtctatgcagacccagcgcccctggggccacgcaaaaaaccgcccgtgctacatgaccgggtgaagacggaaaacaagacggctacggtttatatttccgacgtataccggggacgcgccatggccggagtgcccagaggggaagccaaggccctgcgcgtgtttatgtccgagtacagcccccgcaatacgggaagccactatgccatgggcatggaaagcaactgggacttgaaagtgctgtacggcaccgtgcccgtgaatcctgacggttccgccatctttacggctcccgcctgccagcctctgacgcttcaggtgctggacggggaggggcgcgccctggcgctgatgcggagctggtttaccgccatgccgggggaaacgctcagctgcatcggctgccatgaacggcagaactgcgctccccccgccagggccgtcatggcttcccgccagaaacccgctcctattgttccgtggtacggtccggcgcgcactttctccttcatgaatgaagtgcagcccgtgctggaccgccattgcatacgctgccacacagcggaaagcaaggcccgtggaggagtgccggatttcatgacattggaggccgtcaagggggctcccgcccccggttccgtctcttattggaacctgcacccctatgtgcgccgcaacggcccggaggggaactatctggggctggcccccacggagtttttcgcggatacgtcggagctttaccagctccttaaaaaaggccaccatggcgtggaaatgccgcaggaggactggaaccgcctggtcacgtggatggacatgaacgccccctatctgggcgaatggccgggagagcgcaatgaagggctgctgaaacgccgttatgacctgcacggcagattttcaggagcggaacgtaattacgtgacgatgaaggattccctgttccggagaagcgccggcgtttccaaacctgacgccgggaagcccattgctcgcaccggaggaaagagcgttcccgttccggaaccgcgtaatgaaacgctgactgtggatttgggcgacggcgtgaacatgacattccgccgcattcccgcagggaagttcaggatggggaatgaacgggaaacaccggcggaacgtcctgtttccacggtggggattgaaaggccgttctggatgggagaggcggaagtgacactggagcaataccgccgcttcgacccggagtatgctaacggatggtatgacatgcattacaaggaccaggtgaggcccggctacgacatggatgccgatccgcgttttcccgtcatccgggtgccttgggccagggccatggaattttgctgctggctttccgggaaaaccgggaaaaaagtgaccttgcctacggaagcgcagtgggaatacgcggccagggggggagctgatacggatttctttttcggggagcgggatgcggatttttccgcgtatgccaacctgggggacgtgacgctgaaggaactggccgtttccggcgtggatcccaggccgattaaaaatcccaaccgtttctgggacttcgtgccgagggatgagaaatacaatgacgggaagctccacctggcccccgtcaagagttacacgccgaatgcctacggattgtacgacatgataggcaatgccgcggaatggacccgttccgaatacaggccttacccctggaaggaaggggacgggcgcaatgaaggtctggactcccgtgttccccgtgcggtgcgcggcggttcctggtatgaccgtcccaggagggccacgtcctcctggcgctggggatatcccggctggcgtccggtgtacaatgtggggttccgggtgatcatagaagactgattgttgaaattgccatgaaactgacaaaaatgttccgcgcttttgcgactgccctttgctgcctgctggccctcatttcatgcaggcagggaccggatgctgcttccggcccgctggctccggtggatgtgaaggtcgtcgatcacctggttgccgtgctggggcatgagagctgcgtgctggaactggtggatcctgcttccggggaaaaggtgaaaagcatccggctggcccagcctcccaacggaatggccgtggatggagcaacggcctatgtggcggaaggcggcccgcgcggagcagtagaagtagtggatctggaaagcggggcgttgaagcgttcttttcctgccgggcatacgcccatgtctcccgtggtgcggggggaaaagctgtatgtggcctgccggtttgattcccgcgtgctggaaatggacgccgctaccggaaccgtgctggattcctggaatgtcccccgtgaacccgtagcgctggccgtttctccggacggcaggaaaatctgggctgccggccatttgccggccggggctgcggacggggatttcacggctgccgcgctgactctggtggaagaaggaaaagctgtccatttcccgctttccaacgggacgcagggcgtgcgcggcatggcgataagcccggatggccgctatctggccgtggcgcatgtattgagccggtaccaggtgcccaccacgcagctggaccgcggctggatgaacacgaatgccgtgacggttatcgatacggacgagccggacaagccccatcccgttctgctggatgacccggatgcgggggcggccaacccgtggggcgtttctttttccggagatggcggaaaactgtttgtgacgcatgcggggacgcatgaactctccgtaattgatttcccggccctgctggagcgcatgaagcgggaaggccggggcaatgagccggtttccgaaaggcttggtttcctgcacggtctccgcacccggatcgcgctgcccttgaacggcccgcgctccgtggcctccgatgggaaaaacgtttatgtagccggctacttttctgattctctggcggaagtctccctgaaggatgcctgcaaatccagggcaattcccctgaacggccaattccggccttcccgggaaaaactgggggaacggtattttaatgatgcctcccattgcttccaggggtggcagagctgcgccacctgccacccggacggccgggtggacggcctgaactgggatctgctgaatgacggcatgggcaacccgaaaaatacgcgcaccatgttcctttcccaccggacaagcccggtgatgacgctgggcgtccgcgcctctgcggaagtggccgtgacggcaggctttgtgcacatccagtttctggaaccttccggtgaattggcggaatgcgtgaatgcatacctgaaaaacatgaaggaagttcccagcccgttcctggtggcgcataccccttccaaacagcagacagggggggaggggtgcgcccagtgccatgctcccggcgtggaaaggggttccttgtccgaatctgcccggaggggcagggaagtgtttaaaacagccgggtgcgtgcggtgccacccccatccttacttcactaccaaggaactggtgtccacggggacggccacggggctggatgaaggtaaaagcgttctggtgccctccctggcggaagtgtggcggaccgccccttacctgcacgacggccgtgcgaagacgatccgggaagccatcacgacatgcaatccgggggatatccgagggaagacgagttccctgaataaccgtgaactggaggatttgatcaattacgtgcagtccctgtaaaggggcgggagggcatgatgacggcgaatgcacctgaacaactggaatggtccggaaaaaacggggcggaagaacgcttcttctgcatgacggcggagccgggcgcaagttttgaggaagaactgcattccctgatgaccaggtaccgcaatctggggggaggggaggaagatgaattcctgttgcgtttccatgtcagcgacccggtgcgccagtcggctgcgctgcggcggatgataggggagaggaactcctatgtttccatggttggccagccccctgcgaacggggcccgcgtggctctggaagcctggcacatcggcggaatgttgggaaaaaggcatatggcggaacagggcggaacggtcgtggaagccctccgcgctcattaccggctgttcctggcgggcaagagggaattctcctccccggacagctgcggccagatgcgggaggaattccgctggctggaccggattgccgccttacaggggggaaccgtgccggatttgattcaccgcacctggatttattgccgggacattgacaacaactaccggggattggtggaaggccgcaacggatgctttgaccgttacgggctgactccggagagccatttcatcgccagtaccggcattgaaggctgtacggagctgccgggccgcctgctgcatatggacagtctgggcatcgcggggctggagcccgggcaggtccggtacatggaagcgccggactacctgtcccccacgcatgtgtaccgggtggcctttgagcgcggcgtccgtattgtgtacggggaccgctcccattatttcctttccggcaccgccagtattgacgcggagggaaacattgtccatccgggggacgtggtgggccagacggcccgcaccctggaaaatatgagcgccctgatggaaaggagcgggggaagcctgtccgacctgaagcaggccgtagtgtacctgcgcgactgggcggaccgggaaacggtccggaaccggctgatggactctccgctggccgctgtgccgcatgtgatgctgaaggcccctgtctgccgccccggctggctggtggaaatagacggaatagccgttaatggagccggagagtccgcctttgcccccttgtaaatcctgctgttcccggaaccgcggcgcacgggcgatttcccttgttatcccgtgcacggaaatggtatcatgaaagcgcatgacttatcgccttaatacggaccgtctggtatttttttccgtgctgttgtgggtgctgttgccgccgggtgtttttgcctgggaagggaatcctccggggccggataatgtgcggtggctggagcagttctgttccagctacatgcagtttctgaccctaggcggcgtgttgtgcgcggttattggttttgtgtgcgccgccctggtctcgctggtgcatcgtctggactgggcgcggagcttgaaaatcagcgtgctgtttgtcatgtccatcctgtgcctggttttgtatggcggctccctttcctttgccgtgttttatcttcccctggccctgattaaccccgccgtgtattgtttcagcgtcggccgggcggaatgagcgtgcgggcaggaatggttttatctttcttttccgtggcggatatccgtggcttccttcaggaagacgacggtggcggcgatggttttggcaatgtctcctatccgttccagagaacggataatgaagagaaggttgacgttgagggaaggggagtcctcccgttcgggggagaccagaagggccagtgctttgcgatgggctttgtccagttttttgtcgcgcaggcgtatttccctggcggcgtccacatcctgcgtttccagacacctggcggcgtctctgaattcggatacggccatttccagcagagggagcacaatatccggggagagggattcctgatgcctgatggaggccttggcatgcttggcgatatccgttacttcctccatgcattcctggagcttgtccccgcatcgggagaaggtgatgacgagcctcaggtcgcgtcccagcggatggaactgggtgagtacggaggagcagagggagagaacctgccgggtttcttcctgcagcgggtcgctgtccgcaatgatgctgttggccccgtcgctgtccgggccggaaatgacccgttccagaatgtccatgtatttcagcaggctgccgcagatggcattgacgcggaggcggatagcgttcagggccgcgtcgtagtgggggaggatgtgattgccggaggatgtcatgaggagaatggtttggaatgggcttttagctgaaacggcccgtaatgtaggcttccgtttctttttccgtaggattggtgaagatttgggacgtttccccgtattccaccaggcggcccatgtacatgaaggcggtccggtccgcgatgcgtgtggcctgctgcatgttatgggtgacgatgacaatggtgagttcttttttcaggtcttccatcaggtcctctatttttaaggtggcgatagggtccagggcggcgcagggttcatccatcagcaggatttgggggcggttggcaatggcgcgcgcgatgcacagccgctgctgctggccgccggaaaggccgtaggcgctttcatgcagcttgtctttcacttcatcccacagggcggctcccttcaggcttcgttccacggtttcgtccagttccgcgcgcctgttgcggccggccacacggaggggaaagacgatgttttcataaatgcttttagggaaagggttgtatttctggaagaccatgcctacgcgcttgcgcagggagatgacttccacgcgcgggtcatacaggctggtgccgtcaatgcggatatccccctggtggcgcacgtccgggaccaggtcgttcatgcggttgatgttgcggagcagcgtggattttccgcagccggagggcccgatgagggcggttacccggttggtttcaaaggtcatgccgatgttgaagagaacctgtttgctcccgtaaaagaaggagaagtcttccacttcaatgatgggctcgtcgtctgcggcggctggttcagtcatgggatggtgaaggagaatggggttagaagctggaggccgcgtattttttgcgcaggcggttgcggatgaggatggccgtgaggttcatggccaccaccagcaggatgaggagcagcgtggtggcgaaaaccatgggctgggcggcgtccgagtccggagactggaagcccacgtcgtagatatgaaagcccagatgcatgaatttgcgttccaggtggatgaaggggccttccccgtcaatgggcagggagggggccagcttgaccactcccgtgaccatgagtggggctacctctccggcgccacgggccatggccagaatgaggccggtcatgacgcccggcagggcgctggggaggatgatgcgtttaatcatctgccatttggaggccccgcaggccagggcagcctcccgcagcccgcgggggacggcggagagtgcctcctccgtggagacgatgactacgggcagcgtcatcagggccagcgtgagggatgcccacaggatgccggaggtcccgaaggtgggggtgttgtccacagccagctttttccagtagaaaagttcgtcgatgctccctcccagatagtaaacgaagaagccgaggccgaaaacgccgaagacgatggaaggcacgcccgccaggttgttcacgcagatgcgcacggcctgaaccagagtcccctgtctggcgtattccctcaggtagatggctccgatgacccccacgggcgtgaccagcacactcatgagcaaagtcatgatgaaggtgccgaaaatggcggggaagatgccgccctccgtgttggcttcccgcggatcatccgtgatgaaatggtacaggttgtggaggaagacgccgcatttgccgaagaaccccaggtcattcggctggtagccgtaaacgattttatccatgcggatttcctttctttccccgtctcccagggcatacacaagagagtctcggccctgttgagccctcagtttggctgcttccgcggtgtaccgggcgtattcggcattgagctgttcctctttggcgcggagccggtccagttcactggccgggtcgtccatatccgtgagaatggggtttttcctggggacggccgtacgctgtccgttttcttcccggatgtcgtaggaacgttctatggccttgatatccagtctgacgtccgccagacgggtattgacggagccgatgtccctggtgtcaatggttttgaccctgtccctcaggtctgtttcccggtccagcacgcggcggaaagcctccatgaattccggtgaggcggcggggatggtttctccggaggccagcttgagttccagaggtttgaccagggctttccctccctccatgcgttccaggcacagaaggcctttgggggtggcggaggcagtgacattgtgcgcgtccacatagcggtaggattgtccataggattccttgctgccggtgaaaagctggtattcccgcacgtctctggctgtggagccgggatgggcggggtctgcggggacgtggcgcgtctggtcctttgtgatgccggcgtacaggacaagcggttgttcttcttttgaagaaggggcgagcgtcagttcatggatggttttgggccagaaggcctccagaccgttgaagacgatgatgcccagcaggccgaaaatcatgatgaggcccagggagagtccgatggaggcgagccagatattgacttcccccaggggacgtttgggggcgggcggaaggctgaagtcctgtttcatggaaggtggatggatgggagggaaagggatggatggttcacacgacgttgaagcgtttgcggagacgctggcgcactatttccgccagagtgttcagaatgaatgtcatggagaagaggataaggccgcccaggaagaggacccggtagtgggtggagtcctgcgccgcctccggcagttccgtggcgatgttggcggagagggtgcgcatgccgttgaagatattccagtccatgatgggggtgtttcccgtggccatcagtacgatcatggtttcccccacggctcggcccagacctatcatcagggcggagaaaatgcctgcggaagccaccggaagaacaacggtgcggaccatctgccagcggctggcccccagagcctccgaggcggcgatgagggaaggggggacgttgctcagggcgtcctcggaaatggtgaagatgacagggatgacggcaaagcccatgatgaatccaaccaccagggagttgcgctgttcatagggcatgccgaagccgttgcgccacagatctgcgaaactggcggcctggaagtccccgtcgccccacaggcccatgacgctgcggcagaggctgatgaggggctgttccagccagtagcccaggtattcccagcagaaccaggcgcagagcaggatgacgggggtcatgacgatgtattccacaccgcggctgaatttgttgcgccaggctgcgggccgggtggtccagaaccatgcgatgagggccgccaggccgggaatgaggacggccatgcagagcagtgcggggactttgtcttccattctgggggccaggtaaagggcgccgaagaagcccagcactacggaaggaagggaggccatgatttccatgacgggttttaccacccgtttgacggcaggggccatgaagtgggccgtgtaaatggcggccgtgaccgctaccgggacggcgaagacaagggcgtacagggtgcctttcagcgtgccgaagaccaggggcatcagggacagcttggattcataatcatccgtgccgcccacggattgccagagccatttgggagaatcgtacccctcataccatattttcccgaccagggctttggcgccggcttccgggtgcttgtcttccagagagaagaaatggatgtttcctgatgggtccacggcaatggcggcgttgaattccgcattggcggccagttggaccggaacgaattccagaggtccgctgttccagcggatgtcggccgtggttccgtagcagagcctgagttcccgcggagtggagaccaggaaggaacggttgatgccggatgccgcgtaatgctgcaccggaccgtccatgggagagaattgcctggtctggccgaagaggcgcagggaagttccgtccgggcgggaatggggataaaggctgaaaatcttaaggcttcccctgtcgcctcctatgaccagggacatgtctccgaaaagccagttgacggaagtcattttttcccctttccccagcggggtcggaatcatctggcgtctgacccatgtttccccgtcttcatcataggagaagtaaagaagtttgtccgcatccgtagcgatgacgaggctgtctccggaggctccgggcagcatggccgtggggcggccttccagctggtccgtcaggtcatggaatccggaaggcgccagttctccctcatgaagcagggggcgggattcttccagcgtcatcagcaggaggcgcgtgccctgttccgtctccacggttgcggtaaatattttccgttctcccgcgtccgcataggctatgccggatattttgccggggacggagccgctttccgtcagggggtagagagggccggcttccgctccggctttgtccgggccgtgggcattcgtccggccgtggacgttgagtccggaatgaacatggatgaggcccaccttgccggattctgtggcgatggggtaggcggtgagggatgcatcataggaatgggcgcagacggtttcgccgtccggcagggaaacgggaacggaggacaggttcccggtagttttgtccaggaagaagatgtttttcccgttgccgtagacaaagggaagcgtgccggaagggtccaggccccaggttcccggaaccggagaggagggcgaggggtgctgccgttcttccacgtccgcgctctggaagagaggaatcgtaacggccagcaggaagaaaagaatgccgaaaacggctataatgacggtgaatcctccgccgatgatggttttggtcatgatgcggtcaaaccacagcgtggtttttgccacctgaaagcgttccggaacgggtttgggctttctggaaggtgcgggggagggagcattggaactcatgacggcagagaggagaagttggagggcaggactccggcgggcgggccggagtcctgccccggcatgtgtttacggcacgggaagggcgtgtttattcaatgctcttgagcacttctgcgctgactttggcgggaatcgggtaataaccgtccttggtcacgatttcctggccgtctttggatacgatgaatttgatgaattccctggtcagggtgtccaggggttctcccggtttcttgttgacgtaaatcagcaggtaacgggagagcgggtatgttccgttgatgcagttatcgtaggaaggctgtaccgccgcctttccgcttttttccgccagggagagggtttttacgccggaggtgacgtatccgatgccggaatagccgattccctgttcgtcggaactgatgccctgcacgacggcggaggaaccgggctgttccttcacggagtttttatagtccccttttttcagggctatttccttcacgaacccgttcgtgccggaggcgctgtttctgccgtaaatggagatggcttttcctttcatggagggcacccccgcatcgccccagtcggtgatgttggagccgccgcgcttgaaagtggaggagaaaatggagtcgatctgcgccagggtaagggcctggatgggattgttcttgttgacaaagaaggccacggcgtccagggccactttgatttccgtcggcttgtagccgtatttggcttcaaaggcggcgatttcctcccgcttcatctggcggctcatgggggcgagctgggccgtgcctgccgtgagggcgggcggcgctgtggaagagcctttgccttcaacgccgactttgacgctggggtattttttgctgaatccttccgcccagagggtcatcaggttgttcagcgtatcggagccgacggcgttcaggttaccggaaacgccgctggtgggcgcatacggcttgatgctgctgtcaacggtcacttggttggcgcccatgctcagggagctgagggcggcggcgatggtcaggattttggcgacaaatttcatggcgtcttttttggtgtgttgcgtcttccgtttccgtccggcggggccgttcatggcggaagacggggtagtgataccctcccgcccccatggtgaggaagagaatcctggttaagaaatcgtcacaaacccggagtagccagggagccctgtttttgggataccatgcgtccagaggcgcaggacgcgccattagaagaacatgactccgcatccagcagcagccgaccagaccgccgtagaggtggattccctggatttttgttatgggagcaagcaatccctgttcaacgtcaccatgaaagtccccaggaacagggtgacggcgttcatcggcccttccgggtgcgggaagtccacgctgctgcgctgtatcaaccggatgaatgaccgtattccggaggcgcgcgttacgggaggctccatccgcattgatggggtggacgtgacttctccttccatggataccattcgtctgcgccgggaggtgggcatggttttccagaagtccaaccctttcccgatgagcatttatgagaatgtagcctacggattgaagctggcgggggtaaaaaaccgcggcattctggacgaggctgtggaggaaagcctgcggcatgccgctctttgggatgaggtaaaggaccgtctccatgcttccgccaatggtctttccggcggccagcagcagcggctgtgcattgcccgttccattgccgtgaagccgcgcatcctgctgatggacgaaccctgttccgccctggaccccattgcgacggtgagggtggaagagctgatgcaccgtctcaaggacaagtttaccattattgtggtcacccataatatgcaacaggctacgcgcgtttcggacctgaccggttttttcatgttgggcaggctggtggaatttgatgctacggaaaagattttttccaatccctccctgaaagaaacggaggattacattacgggaagattcagttaacagagagacgattatgctttttccaaagaatatttccaaaaatggaaccgggcgtgttctccatgttcccggctctggacgaaggctggctgccagcgccgccagaaagaacagcctgcgcaggcagcatcttttttatcatgccggcaaaaccttatccaatcatcaagccaatattccgaatcatgaatcacgacgcgcacaccctgagggagtttgacgccgccctttcctccctgaatacgcatttgctccagatggcctataaggcgcagagcgcccttgatttggccgccgccggccttttgcagcagaatgagtcttccgccaatcgggttattgctgatgacgaagaattggacgagctggaaatgacggtggacagggaagggctgcatctgctggcttttttcagtccggtggcttccgacctcaaagtggtgctggcttccctgcgtatgtcctccatgtatgaacggattggtgatgaggccgtgaccatcgccaaaagggccaacaggctgaataagcgcccgcgcatccgggaggctgccttggcggatcctgtctatcgggaaatggcggagcggttcagggctgtgaataaggctgtttcctcctgggacggggaggctctggcggagcttgtccctgcgctggaggatttggcggagcatgcggcgtccctgacggaggcgtttgcctgcttgcctgagcaatatcaggacaatctggtttccgttgcggatctggtttttgtgagccgttccctggaacgcatcgcggaagggctccaaaaggttgcggcggaagggctttacgcggcctcctgatgccgcgtgcctgcacaggaaagcccgctgcaggcgttgttgaagcgccgttttttgttcggaaacgggattcaggcatgccgcctatctgacagtccaggtaatgctgcgcgtggcggattggccgggacgcagaatgacgctggggaagtggggggtattgacggcattggggaagccctgggcttccagcgctattccctggcgcgcctggggcaggtattccccggtatatacctggaggccgggagcatccgtcgccacaatcaggcggtgccgggattccgggtcaagaaggatggcggctattttgtcgcccggttcggaatccagcacgtagttgtggtccagtccggcggcggtgtccgggtgggcggcggagttgcgttcccccagcagggctgctttccgcaggtcaaagtccgttccttccacgggaagaatacggccgtcggggatattggtcgcgtccaccggagtataggcggaggcccgtacctccagagtcatggaatcaatggtgggtttgccggacaggttccagtaagcgtggttggtgaggttgacgattgtggccgcgtccgcatacgcttccaggcggagatgaagggtttcttccaccacggtgtaggtggctaccacttccaggttgccggggtaattttcctcaccgtctgcggagtgcagggtcagcaccagcgtattgcgcccggcttcctgcacctgccagactttgctgtcgaacccctggatgccgccgtgcaggtggttggggccgttgttgacggccacggtgcgggaatccccgtcaatggagaacctgccttttgcgatgcgattcgcgacacggccgcaaatcgcaccgcaataacaggtgtctttcagcatgtcttcaaagtgcttgggccctacgatcatgtccatgccgtccttgacgacggagatgatgcgccccccgtagttgctgatgcgtaccgtcagcttgtcggaagacagttcaaacaattctacaggtgcgccgccgggtaaggtgccgaagatcatgccggtatatagcttggtcagtagtggatgtccaattaataggccagcacgcgggaaccgttgttgccgatgatcacgcgcacgcgctgtccgacctgaatcgggttgttcctgctggcgacctggacgaccgtgtagttgcgggtgccgttcctcttctggtccagacgcacggtgatgcgttccccggtcgtgttgttgacggccttgtcaatctggttgccggcaatgccgcccagaatggcgccgcccgccgccgtcgcgaatttggcgttgcctcccccgaacatggcgccggtcaacccgcccgccacggcgccgattccggtgccggtgttggcgttattggcctggatcttgacgttttccacgctggtgaccgtgccggtataggtttcctgggctccgccgatttcgttcaggttataggtgttcggggaaccgaagttggtgcaggaagtaatggacagcgccatggctgcacagccgatggtaagaatggaagctgttttcatgatgacgatttataaaatgggttgaaggttaagatcaagtaatttcgcagtcaacggaaggggcgcggctgccctcttccggcggagaaaacccttgccggaaggttccggcaagggttcttatttattttaacggtccgttgggtcaggccttgggggcttctccctttttggggcagtcgcagggcttttcccctttgctgcaaggctggccgcatttttctgggcatttgccttccttggcgcatttcctggggcactttttatcttttttgcagcacttctgggcagcaggggcgggggactccgccggagcggcggcttcctgagcgtaaccgttgacactgaaggcgaaagcaaaggctgctacagcgaggatttttttcatataatgatatgtgaggttgtgtggtgttggtaatgcagcggcagaagagctgccgttctacgacagatagagcggcagggagtgatatttgttcaaaaaaatgcgcggagaggattctttttagggcggtttttttgatgaggacgcgcttttggcctccggggtaagtttgacagtccgggggcacgtacggagcgccggcttgcatggggcgccttcttgaggcacggtagggaacatgagttcagccaaggaacctgtgacgcgccgttttggaaatggtttgacggttttgattaaggaggacaagtctcatcccgtagtgtccctccagtactgggtaggcacggggtccatgaatgaggggcactggcaggggagcggactttcccatttgctggagcatctggtgtttaagggaacggcgcatttttccgggcaggaactggcccgcaaggtgcaggaacgcggcggccactggaatgcgtacaccagcgtgaaccgcaccgtgtactatatagacggccctgcggagtcctggcagattttcctgaatcttctgacggagcttgtatttttccccacgttcccggaagacgagatggagcgggagaaggaggtcgtgcgccgggagatggccatgtatgcggatgatcccgattccgtggcctaccagcttctgatgcagacgctgtatctcaagcatccccgccgctggcccgttctgggtgagcgcgccgcctttgactgcctgacgcggcaggacgtgctggattaccatgccagccgttatgttccgaacaacgtggttctttccatcgcgggggacgtggatgccgcggagattctttcccatctggaattgctggtggaagacctgaaatcccgtcccctgaaccgggaacccattccccatgaacctcaccagttcggttcccgcagggtgcggaaggagtttgccgtgccttactccaagctgcaccttgcctggcgcctgccctgttccgcccatccggatacgccagccctttccgctctgtccagcattctgggaggcggacgttccgcccgtttttatgaaaagttccatgaccgcctgggcctggtgtacagcattgaggtgcattccaaccagtctgagacggatgaaggggcgtttaccatcagcatggacgtggaccgcgcccagcgcgacaaggtgcgggatctggtgcttcaggagcttcgcaatctggcggaagaggattttatggaggacctgaagagagtttgcaaacagacccgggtcagtcgcctgcgccgcaggagttccgcttccggggtggcctcggaaatgggggcggactggttcggctcgcgcaatttgaacctgtcttccgaatggcaggaagctattgaacgggtgactacggaagatttgcaccgcgtttgttccacctggctgtcttccccgaatgtgacggaagtcagcctggaccccccgggcagcaacgccggggatgaagaaagggcctccgcctctgcgggaacggccctgagcgagcatgttcttggcaacggcctgaaggtggtgatccgtgaagaccatcgcctgccgctggcctatgcctgcatggcgttcaaggccggatgccgtgcggagaatgagcatgacgccggggtgacggacctgatgtccgagtgcctgctgaaaggaacctccacccgttccgcggcggatatagcccgttttctggaggacatcgggggagccatcaacacgtccaccggtaacaattccctgagcgtgggatgtcaggttctggcggaagacctggacgccggattggagctgatggcggatgtggtcatgaatccgtctttcccggaagacgcctttctgagggaaaaggaatcttttgtggcggatgcggaggaggatatggaagaccctctttccgtggcgttccggcaggagcggaaggtggcttacgggcatgtttcctatggaaattccccttccggcacgccggaaagcctgtcttcactgacggttcaggacatcaaaaaacagtatgaacgcattatctgcgcttccaacgccgtgatttgcatttccggagatgtcaggaaggaggaggtcctgcctcttctggaaaaacatctgggaggcatgagggcgggaacgcctccggccctgactcccacgcccgcgctgcgggccggccgggaagtggccgttctggataaacagcaggccgtgctggtagtgggggtgccgggcgtggacgtggcttccccggagatggcccaggctctgctgttccagtcctggtgcagtgatatggccggtcccgttttcaccaatatccgggaggaggccggactggcctattatgccagttcttccctgttcatcggcatggatgccggaggcatctgcttctatctgggcacttccccggaacaattggaggaagccgggcggaggctggaaaaaacactggagatgattgatgaacagggcatgacggaggaggagctggaacgcaccagggcggccgccctgtcttcccgtctgctggccatgcagtccaatggaactttgtgccagatgctggcgctggatatcctgttcggtctgcctctggaagcgtttgaacagcagacggacgctatcaggaatatggatctggcccggatgaacgcctttatcaggaaggtgctggatcccgcccagccgcgttcctggtccatcgtgcgtccgcctgccggggagtaattccccggaaaatcatttcctttttccctgtccgggaaaaaggcaggattaaataaaaaggaatatttttgcgttacatcatctgaaggctgggggaggggtgtagcggaatcgtgatttttatttcagtggtgatgcgctatagtggcagccatgactgagatggagccggacaggaaaactgcggaacgggcaatcagggaagcgtatgaatccaacccggggggctgggcggaacattcccgctatgtggcggaagcctgtaaaaatatagcctcgcgctgtaaagggttatccggtgaaaaagcttatgtcctggggctgttgcatgatattggacggtatgccggagtaagttccgaaaagcatttgatagacgggtaccgctattgtgcggcaagaggctggaaaaaggcggcgcagatttgtatttcccatgcgtttatgatacaggatatcaatacttccatcggcacgtttgacgtgagtggggaggattacctgttcatgaaagattttgtagagaacgcggtctatgacgactacgaccgcctggtccagttatgtgacgctttggccatgccgacaggtttctgccttttggaaaaacggtttgtagatgtgacaatccggtatggagtgcatccgtttacggtggaccggtggaaaaaaattctgcagctcaaggcgttctttgagaaaaaagcgggctgttccatttatgagcttctgccgggcgtcgttgaaaacagttttcgccaggaggaaagccatgcgtgatgaagcggaagatttttttggaaacggcacatcccaatgcgctaaggcaaatcgcccgggagggggaatttctgtgccggccagctgcgttgctgttgggagtccatgcagggttatcaggcgtttttgacatcaatagctggaggccgccgcgggaggcggaggattcggaagtaccccttttttcatggcggaacgtttgatctgctcatggtaaaagtaattcacgataaccggcggttcgttgaacggccggtgcatggaatcgtcattgcgcaggtacggcaacccccgtttttccgctagctgccgtattgctgcgtccagtccttcccagtagccgcggctgcctttctggtaaatttcccgatagaggggaaccaggtgcggatagcgtttgttgatgtactccagaattacggatttgtagctgccccgcagattcaggttttccagccagatcaggttgcatttgtcttcagcctgctccacaatcgccggaatatccgtaatgcccggaaaaatgggggagatgaagcaggtggtgcggattcctgcctcatggaaggccttcatggcggccagcctccgcgagatgctcaccgccatgtccatatctgcctgaaagcgctcgtcaagcgtgttgacggaccaggaaacgcgggcatggggaaatgtttttatcaaatccaggtcccgcagcaccaaatcggattttgtagctatgctgatttccgcgccgctgccttgaagctgttccagaagcgcccttgtcctcttgtagatttcttcctgaggtccgtaagggtcggtcacggaaccgataaacagctgttttcccgcgtatttcccggggttgcgtatttccggccagtatttgacgtccagaaaggttccccatggttccggatgcccggtgaaccgtttcatgaacgaggcgtagcagtatttacaggcgtgggggcagcccacgtaaggattgaccgagtaatcggccacaggcagatttgacgttgacaggatgctctttacctgaatttcccttactttgattgcatcagcgttcatggttttaaaaagctcctttgcattccctgctgcacggtatcggaagggagcagatgccccagtagcaacggagagtccgggtcatggagtttgtaattttcacgggccttttgccggttcgtatttgcatagcagtatttgcagccgttaaggcaggtgtcatacgctcctatgtcccggctctcaatgcaatggcagccctgccgcattccttgatgtttcaggttgcggaattgaacgccgttggcctgtcccagaatgttcagggtcatgcagccggaggatgaaatgccgtaacgcgtgtaatcgccattggttccgcaggtttgaatggggattttatattcggccgcgattgctcccagcccggccgccagctcctccttgtctttttccgtgagggggattagttccggcatgttggtttgcagcttcctgtacatttccacaaagctgaaaatgcagcggtcgatgtggccggataagaaggacgccatgcgttcaaaggtctccagatgccttctgatggtatattcacttgtcagcaataccgggtcataccgccatgcgatgcggtttgctccgacaacttccgaaagttttgccagcgtggccatgctttcatcaatgccgggaacacccggttcaatttcctttccgtaggccgtaatcgtatagtggaagtaggtatggaagcgctcggtgatgctgttgatatgcggaagaatgggggcataatttttagagcagaagacaacacagtccacttggtccggcgtcagttcatagcgggtcaccttatgttggaacaggggattgcgggaaaggacatagccttcttcaaatctcttcagcagccagcgggtgtaatactggacggtgtccgtccgtcctcctgtattgataatcatagcgtgtttttgttgatggattgaaatttcagatgcatttgttccgaaaaaaggtcggttaaacggaccagttccgcttgctgttctccgctcaattccgccatggcgtcgttttccgcctgcgcggcaggggggatgatgcgttccacgtattcctttccggctgcggtgaagcgtatcaacctgattctccggtcggttttggattcttcaaaagaaaggtaccccagcttccagaattttttgatggcggcgctgacggtttgcttcgtggcggagaggcgttcgcaaatcccggcctgcgtgcagccgctctgagcgaaatagatgatatccagaataaacagctctttggtggttaacccgtgttttctggcgtattccgtatagacggcatattgtttgtcccgcagccggcagtagttgtttacgtggatattgacgctctctttgctcataggcggagatgaataaagtatgatatttgatggtctgatatttgacaaaaagaatgtagctcttcacgcgttttttgtaaagccccaaatataaagctccagataaagaggcgggggatagggacggctttttgcgtggccaggcaaatttccggaaacggtgccggggcggcaatggctgccggcctttcaagaatccgggacattttccgtttttattcccgtatcttctgtttcgcggcagaagagtttttgttgccgcatggcttcggaagacaggtgcctgtggctgccagggaaacgtttttccgtgttcacgggagttggagagcttgcccggcggggcttttccgcaccagggcaagttccgcctgctccggtgacggatgtttcgccggaggcggagagagagcgtggagactcaataaaaaacgcaggcggcgatgcgcctgcgtgatatccggcgatggttcggacagaagaaagaagcggtttttctgccggagggtatttgtgtaaaacggcatccgtccgcttcctgaagaacgggagatgacccaggggttcccagcaattcctcttccggagcgggaacggtatttggaaaaaagtgcggtaccttttttccgttcctcattttcgccgccccctgagaaaccccggcgcgcttttacgcttttggagaagcggcccgtacaaggcaggcacgccagggaagaacaggggcggctgttttttagccgatttccgtgcggcccagcaggtgggcgccttcctccatggcgaggctgcgtgtcttcatgtccccgacgacacgggcctgctgcttgagttcgcagcggtcagaggtgaccttgccttccacgttgccgtagatgcggacgtctccggcagtgatgtctcccttgatttgagcggtttcaccgatggtgacttttcccttgtcggagatgatttcgccttcgattttgccgtcgatgtgcatgtcattctggaaacggatggttcccttgatttcgatgccggaggcgaggaagttggttacgttgtctgtcattgtcgtaaaatggttggggatgggttaaatggtcatgatatccttttccttgacggccaccagctcgtcaatctccttcacgtatttgtccgtcagcttctggatctgcgtttccagatcgcgctggccgtcttccgtaacgatgttttccgccttgagctttttggcggaatccatggcggccttccgggcgccgcgcacgcgcacacgggcttcttccgcctgggatttgacaagcttcacaaggtctttgcggcgttcttccgtgagggcgggaatgggcaggcggatggaacggccttccaccaggggattgaggttcagcttgctttcattgatggcgcggccgatgtcgtggacggtgctcggatcaaagggctggatgaggatgagacggggttccggcgtgctgatgacggccaggcccttcagtttcatgacggagccgtagctggagacatgcacgtccaggttttccacgaggccgggggaagccttgcccgtgcgtacgccggagaattcctgtttggcgaagtccacggccttgagcatggattcctccgtttccaataataatgtttctgcgtccatgatgatggtgggtgctaagtgtttttggtgggttgaaaaggaatgcggggttcagctgatggtggtgccgatcggttccccgagaagcgcgcgcgtgatgttgcccggcgtatgcatgtcgaatacgatgatgggctttttgttgtccatgcacagggtgaaggccgtggagtccattactttgagctggcgttccaggcattcctgataggagatggtgtcgaatcgcttggcgccggagacttttttggggtccgcatcatacaccccgtccacggaggtggccttcatgaccacttccgcattgatttcgctggcgcgcagggcagccgtggtgtccgtggaaaagaacgggttgccggtgccggcggcgaagatgacaattttattgttgtccagatacgagcgggccttcaggcggatgaaggattccgcgacatttttcatttcaatggcggattgcaccacgcaggggacccccgcgcgttccagcgcgctttgaagggccagggcgttcatcacggtggcgagcatgcccacgtaatccgccgtggcgcggtccatgccgcgcacgctggctttcgccccgcgccagaaattgccgccgcccacgaccaggcctatttggacgccggcgcggtgcgcctgggcgatttcttcagcaatgcgggcgacgatttccggggaaatgttgtccatgctgccggggctgcgcaaggcttccccactgagtttcagaaggattcttcgataggctggtgcggatgtgtcagacatagatgcggattttacgcagacaagattgaaatttcacggggcaaaaagaaagcaaaaagagattccttattgatttttctccggaggtccggagatttccaccttgatggggcttctgctctccaggctgcgggtggggaaggggaaggaaatgccttcttcctcaaagcggcgcttgatgtcatgggcgagcgttttctggcagtccaggaaattgtctttccggcaccaggcccctacggtaaagcccagggaagagtcctggaaccctgaaaacgagatgaggggcgcggggtcatccaggcagaatttgttttgtttgactacttcccggaggacgttcacgacatgctcaatgtcgcagttatagtccacgcccaggctcaggtcgcaccggcgcgtggaaaaacgggtgatattgctgaccggattcttgatgattatttcattggggatgcgcaccatggtgttgttcggcagccggagctggacggacatcaggttgatggagtccacgttcccggtgattccattcacttcaatcatatcccccaggttgatctgcttttcccctaccaggaagaggccgctgatgatgttggacagggaggtctgggaggcgaagcctacggcgacgccgatgatgctggccgcgcccagcagggtcaggatatcgaaccccatcagggcgaaggcctccacgcctataataatgtagccgacgtttttgacgatttttaccgtcaggcgggaggcctggggcgacattttcaacgcagtgattttccggagcacctggcagaacagtttcaggagtatccagctgatcaccagccataccgccacatgcaggattttgattcccacggactgcaccatttccagcttgagccagtccggcatgttcaggaagtccatggtttttgtccagatatcttccctggaggatgcgtctgccatgagattcatatgaaggatgtagcagacgcttctccccggctcaaggggcgcgcgcgtattccccccggtttatgacagttcctccggcagcggaaagggcagggtattcaggcgcggcggacgcacaggttcatcttgcagaagggggggcggtttccggcgcaggaaaggcggcggatgcatggccggatatggcgcctggttgggaaagaggggaaggcggggatgaaaaaaggccgttcccccggaaggggagcggccttgaaatattgccggggggactgcttacttgctgaggtaggaggccacgccttcgtgggacggggtcatggccgcgtctcccttgtgccagccaagagggcagacttccccgtacagttcgaagtgctggagggcgtcaaccacgcggatggcttcatcaatggagcggcccagcgggaagtcgttgatgagctggtggcggacgatgccgtccttgtcaatcaggaagaggccgcggtaggcgatcagttctccgttgacttccacgttgccgtcttcgtcaatttcctcgtctccggccagcacgccgtaatcggcggaaatggtcttgttgatgtcggaaacgatggggtaggtcacgccctgaatgccgccctgactgcggggggtgttgatccaggcccagtgggagaattcgctgtctgtggagcagccgacgacggccacgtcacgcttttcgaattcgcccagggcttcctggaagccgatcagctcggtagggcacacgaaggtgaaatccttcgggtagaagaacaggatcacgtattttttgcccttaaactggtcaaggctgaaatccggtacgatggtaccgtttactactgcgttagcgctgaaatgaggtgccggttttcctatgagaagcatggttgttttttggtttggttctaaaagaatgattccaaaaaacggacgaaagtcaagcggcaatgataccccgttcgttccaaaagagcctgttttctcttgaaagtgaagctttttttgtcagtattccctccatgtcatcctcaaaggcgcaacaagacgagtggtccggaaaaataggcgtgattctcgctgtggccggcagtgccgtcgggctgggaaattttctgcgctttccggggctggctgcccaatatggagggggcgccttcatggtggcttacggcctcatgctggttctggtgggcgtgcccgtggcgtgggcggagtggtccatcgggcggcgcggcggccagatgggcgcccattgcgcccccggcgtattctggtacctgaccaaagggtccaggctgtggaagttcctgggcgtgctggcggttctggggccttcttccgtggccttttattacatggtggtggaagcgtggtgctgcggctatttctggaagatgctcacctgcccggaggtttttgccacggcggaggggacggcgcagacttttttcagtttcacgggcatgtacggcgacgggagcgccctgttgtcggacaacgggctgctctggattgtcagcggggtcatccttttgaacctggggattatttaccggggcatcagcaagggcatcgaaatgttttcgcgctggttcatgccgttgctgcttctgatttccctggtgctgctggtgcgcattttgtgcatcggcacgccggacccttcttatccggaccgcagcatcgaacaggggctggggtatatgtggaatcccggcaaggtgctggtggaggagctggaccggaacagcggggactggaagacggtttccatggtttcggcctcccaggcgggagccatggatgaagccgtgcggcaggtggaaatgtccggaggaacccggaggctgactgaggtgaccctgtgggacggcctgaaaaacattgagctttggattgcggctgccggacaggttttcctgagcctttccgtaggaacggggctgattctgacgtatgccagctatgtcaggaagaaggaggatatcgcgctgagcggcttttcggccgccgcttccaatgaagtgtgcgaggtgggcattgccggcatgatgacggttcccgccgccgtggcgttcctgggagtggccggagccgccgggcaggggaccttcgcgctgggcttcatggtgctcccgcaggcttttgccaaaatggggtccagcgtggtattcggcagcctgtttttcctgcttctgacggtggcggcggtcaccagctccatttccatgatgcaggtgggcctgtcctttattgaggaattcatggggctgaaacgcaaaatggctgtggtggtgcagggcttttttacggctacgggcacgttcatcgttgcctggtacagcggcaatctgctggcgatggatacttatgatttctttctgggtacgctgtgcttctttgtgagcgccatggtgatgatgattctgttttcctggaaactgggggtggaccgggggttgaaggatctggaggacggttccgtcatccgcattcccagaatttaccgtttcatcatgaagtttgtgacgcctacgctgctgctggcgattttcctggcctggctggcgcagaatatctgggtgaagcaggccgcgcccattgaagctctggggcgtggggaacatggagcggtcattcccatggggtttctggcggcttatgccctgttcctgattttcatcaccatggcttccggaaggcataaggtgtaccacggtccgcgataggcggggaaggcctgctgcgcggatgcccgttccccgcagtttgcggcaggccgggaggcaatgcggaggcttgaccggagccggatttgatataggctggcgtcatgcccagaataaggaggatacgcaggaaaaagccccgtgccggcagcgtctggaaaaagctgctgctgtggggcgtgctggggatgcttgttctggcggcggctgcggtggcgggatcctatctgtacgtcaggtcctatttgaagagcgatggttttttagccatgctggaacagtccgccgttgatgatatgaatgtggagaccgccaggatagaccctcttgactgggacggttccggcatccggtgcggcggcgtaacgatggaggggcatgagtttttgacttcccttcaggccaggaacattgagacggaattcagccgctgggagttgctgaagcgcgcgtttgtcattacctccgtcaatattgcggagctgaagcttcggctcgctcccgtgcctttccgtttccgggaaaagccggaaggggtcaggagctgggcggaagagaatattctgccggatacgttccgtctggaaaaggggagcattgattccctgtccgtttcctatggggaggccggccggccgtatgttttggacggaacccgcgtggagagcgcctatgacgccggttccagccagtacaggtttgaaatgcagggggggaggctgctccttcctttcaagggatgcccggagttttccctgatgtccggcacggcgcagtttaaccatgccagcaggagggtgaacgttccgtcctgccgcctgactacggctgccggcggttatctggacatcaagggggactgggacggctcttcctcctcctggacggcgaatatggtggtgaacggcgtccccgcctcttccgtcctggaaggccattggaaaaagcatgtccagggcagcgtaagcggcgggatagacctgcgcggcggacgggacggcgtaacccatgtggccgggctcgccaggttgcagggcggcatgctgaccggccttcccgttctggacaggctggccctgttctgcggttcttccagattccggaatcttcccctgcacgaggcgtccgcccagttctcctatcaggaatccgcctggcatatttccaatattctggtggaaagcgaaaacctggtgagggtggaaggctggctggaaatcgggaaagggggggcgctgaccggaaggctgcaggtggggctgcgggccgacggcctgtggaaagctcttccggggttttccgatgtgttttccgtttcccgccagggagcgggaggcaatctggcgtgggccaatgtgaatatcggcgggacgctggacaacccgtcggaggacttgtccgcgcggctcatcaaggcggcgggaaaccgcctgacggaaataggaatgggcaaggcggctgaggtggcggatgtcgcggcgcggctgctgaacagaggggccggggaaaacggggcgggggatggtgcggaacgtaatggccgcaagttcaggattcccgccgcggacgaagtacccgtcccggttgtgccgcggcttcaggacgctgcggaaaaggggcttaaaaccgggaatgacctgatgaacgaactaatgaattggtaacccgtttttttcagatgaaaccttatccctgccagatggtgcaggcggtcgccgttattgtggagcgtatcgcggatacggctttccgcgccacccttccgaatggcaaaaccgccgtggcttttgtagaaaaaaagaacgcttccctgagggatctgctcaaaccgggcgaccgggtgaaggtgacgatttgcccggcggattttgaccgcgcccgtgtggacggactggcggaatgaggcggacgttttttccttcattatggggggaaagaggcgttttgcccggtgcaggaaaaccgctgtaaagacggaaccgtccccatgccgggatggatgcggaaagggctttcctttacagccgggtgcgtccttccagagccttcatcagcgtcagcgtgtccgcgtggctgaggccggagccggcaggcagcccctgggcagggcgggatatcctgcaatccatttctttgagcagatggtggaggtaggtggccgttgcctccccttccacgtcagagcctgttgccagaatgacttcgcaatcaggctgccgggagacgcgttccaccagggattgaatgttgaggtcttccggctccacatcatccagaggggaaagcttgccgcccaggcagtggtacaatccgcggtaggcgctgctgcgttcaatggggatgacgtccgtggcctgttccaccacgcagatgaggcggctgtcccgttcttcatcccggcaggcggcgcagggttccccttccgtgctgaagaagccgcagacggggcagggcgtgacgtgttccgccgcctggccgatggtgcgggcaatcgcctccgcttctcccatgtgcccctggagcatccacagggccatgcgttccgcgccgcgggcgccgatgcccggaagctgtttcagggcggttaccagttcaagcacggggatgggatagtccagattattcatgagcggaaggaggttcggaatgacgccggacagggggcgtttggggacagaggatggcgagcacgcccgcgctccctgcggaaagcaggcatgggacggcattgaagaaaagaccccacagccccagcaccggggtaaagctggccagaagaaggaggaaagcggccagaacggccgttttgcggagcgtgccgcggatgagcagcaaatcgtaaacgagggccagcgtcaacgccatgcacagcaggaatcccgtgccgggagaaagggcgggggcgtccgggggaagcagaaacggggcggaggccatggcttccttcagctcccggccccagacgggagtaaggcccaggtaatagagcaccacgagcaggataagcccggctacggagaacagggcccagcgcatgagcagaatgtcctggtgcgttttggcgggcatggcttttaaatgaaaaaagcggaagcgcgatggctgcggtggccgcaaacatcagcgcttccgccggaaaggagaggcctgaaagggtcaggcgaatcgtttcacgatgacggaggagttatgccccccgaagccgaaggaattgctcaagacggcgtccaccctggtttcacgggccttattgggcacgcagtccaggtcgcattccggatcctggttgtccacgttgatggtgggcgggatgatgttgtcctgcatggccatcaggcaggcggccagttccacgcctcccgcggcgcccaggaggtggccggtcatggatttggtggagctgataagcagcccgtttttagcgtggtcgccgaaaacggccttgatggccttgatttcgcagatgtcgcccagcggggtggaggtgccgtgcgtgttgacgtagtcaatgtcttccggcttcattcccgcgtgttccagagccatcttcatgcagcgggcggcgccgcggccttccggatccggggcggtgaggtggtaggcgtccgcggagatgccgtagccgacgagttccccgtaaatttttgcgccgcgcttctgggcgtgttccagcgtttccagaatgacaacgccggcgccttcgcccatgacgaagccgtcgcggtccacgtcgtacgggcgggaggcccgctggggctcgtcattgcgggagctgagggctttcatgttgctgaacccggctacgcccgtgggcaggatggtagcttccgctccgccgcagaccatgacgtcggcatccccgaatttcatgatgcgccaggcttccccgatgttgtggttggaggtggcgcaggccgtgacgatggacatgttcggaccgccgaggccgtattccatggagatgaggccggaggcaatgttgctgatcatgtacgggatcatgaagggggacacgcgggcaggccccttggaaagaagcgtggcatgctggctttccagcgtgccgaggccgccgatgccgctgcccaccatgacgccgatgcgggttttgtcctccgcttccagatccagcccggaatccttgagagccattccggcagcgcccatggcaaagtgcgtgaagcggtccacgcggcgggcgtccttgggcgtcttgaagtacggggcgggatcgaaatccttgacttcaccggcgattttcgtggagtagccggtaacatccatggatttgatggtgtcaatgccgctgcggccagccttcatggcttcccaggtggatgcgagatcattgcccagggggctgatcactccgatgccggtgataacaattctgcggtcggtcataataagtgtgagtggttgcaaataatgcttgaaccagaataggcgacattgcgggaaagtcaagctaatcccccctgtttcccggcacgggggaaacaggttgggcggaaaggtgtatcctgcttacggcaaggattttgcgggtcaaggatattccctgttgcctgctgaggctccgaggccgtgaacggatttcagggtaaattccgccgcggcggccgcatccggcagcgcatggaagggcggccggatattttttcctgccgcgcgcctttaacggggggcatccgccgccatcggaagaggggctgcccggaattccagggaaagggaattgacgcagtagcgcagattcttcggagtcagacgttctccattgaaaatgtgtcccagatggcctccgcagcgggcgcaggtgatttccgtgcgccgcccgccgcccgcatggacgcttgtgacggcgtccggcagggaatcatcaaaacagggccagccgcatccggcatcgaatttgtcttccgaccggaacagaggcgcaccgcatttgcggcaggaatagatgcccggatcaaagaagctgacgaattccccggaaaagggcggttccgttccctggtgttcgataatgcgtttttccgtttccgtgagggggcggcgcgtgcgggcagggccgggatcgggtacgtcccgggaggcgggaatccctccattcacggccatgactccagccacgccttccgcaatcatgcctatccatgacgcccagtgtctccgttcttcctgattcatatggcttatgaccaggttggagcgggttttgctcattcctgaaacgatatcttgtgggtattgccgtttttaaggagagagtcctgaaaatatggcagtctatggaagagttaatactccagctccagccagagctgttcccagatgccctgccgctgttcttcctggggatgggagacggacagccccagaaggcggaatgtacggtccccggaatccagttcttccatcagggtgcgggccagggggagaattccttctttctccgtcaggatttccggaacggtcgcgcagcgggtcttctggacaaagtccgggaacttaaccttcagggtaagggtgtttccccggaagccggaacgggccagccgccccgcgagttcttccgccagcagggggaggcgttgttccagcgcttccgccctggtgacgttttcccggtaggtttcttcacaacccacggatttgcgcatgcgggaaggttccacagggcggtcgtccacaccgcgggcgaagttgtagaagatggctcctgttttgccgaaatgccttaccaggaagtctttgtcccgtgcccggagctgcgccccgttggtgatggaaagggcgcgcatgcgttcggcggtggcgtgcccgactccccagaaagcttcaatgggaagtgccgcgatgaatttttccgcccgggatggatggatcgtgaacagcccgtccggcttgcggtaatcggaagcgatttttgccaggaatttattgtaggaaacgccggcggaggccgtcaggtgaagttcccggcggatttccttcttaatcctcctcgcaatgtcgacggccagcggaatgcccggcttgttttccgtgacgtccagaaaggcttcatccagggaaaggggttccaccagatctgtgtaacggtggaaaatggcgtgtatctgcgcggagacggccttgtacacatccatgcggttgcgggtgaaaatcagatgggggcaaagcttgagagccttcatggaaggcatggcggaacgcactccgaaacggcgcgcctcgtaactggccgccgccaccacgccgcgcatttccggcctgcctacggcgatgggcttgccgcggtattcgggatggtcccgctgttctatggatgcgtaaaaggcatccatatccacatggatgatttttctctggttcatgggggcgcttcatgattcctgatggggcgggaaacatgagggaatgggatgccccatcataatccggcttatcctgcaagtccagttggaaggagaagttccggcggggaggtgaaagaaaggcggatttttggggaacgggacgatttaagtgaaaaaatcttccgggcatggtaaattccgggcatgtccagcggaatgaaggaacgcctgtgccggaacctggaaaaggtgctgcatgcggaaccccgcgaattgcctgccgcagcggggggaatcctcctgtttttcctgttgttcctggcctattccatgttgaggccggtccgggagacgatgggcattgccggaggcgttcagaatctgcagtggctttttacggctactttcgccgcttccatagggggccagtttttattcggatgggtttcctcaaaggtgcggagaaaagccattcttccgtggacgtacggttttttcattcttaacctggcggttttcgcggcgctcgtgctggcatgcccgggaaatgtctggacggcccgttcgttttatgtgtggctgtccgtatttaacctgcttaccgtttccgtggcgtggagcgtgctgtcggacgtcatgaagccggggcagatgaaacgcctgtttgccctggttgccagcggaagcagccttggggccatggcggggccggcggtgacggccgcccttgccggagtggccggctatctgtggctgttccttgccgccgctgtttttctggcgctggcgatgctggcgggaatgtacctgcaccgctggcgtgacgggaattccccggaagatgaggaaacgggagttcttcttccggccgattgccgggaacgccctctgggagggaacccgtttgccggggcgtccgccgtattccggtctcccttcctgatgggcatcgggctgttcatcatcctgctggccgggaccaatacgttcctgtattttgagctgatgagcgttgtagcgtcttcctttcctgatccggtgcgccagacgcaggtattcggagcgctggacgttgttgtccaggggtgtaccatgctgcttcaggtatttctggcgggacgcattgttcggaaattcggattggcggcgttgctggcggctgtccccgttcttatttccctgggttttgtatggatggctttcgctccggtatttgccgtcgtggccgtggtgatggcggtacgccgcatcggggaatacggaatggtgcgtcccggccgtgaaatgctgaattccgtattgtccccggaagaaaaatataaagccaagagttttattgatacggtcctttaccgtggcggcgacgccgtcagcgcatggctgaaaagctcctttaacgtgttgggggcccattccccgtgggccatgctggccggagccgccatttcctttctttgggcggccaccggattcctgcttgcgggcaggttccggaaaatggccggagtacagggaaagaaatgatccttatggcggggaattttccgttttgtccggatacggcccgccagatgcggcaattcctggtgatgcctcttttccggcggctgccgccgtcagaggtgaactgctgggatgctggggaatctggcgcgttttgaaaaagcgtggcaaagccgtgttctgtggaggaataagtgccaggccttccgttgagggatagttgcaggcaggggattgcgtgatgcccttgatggcggaagcggcggtaggcaagacagatgtttttctccggcgatgaataatttctggaatgttctttatttgacggcggtttccctctgcggcggcaacatgcggattttcaatccgtttcatgtgccgtagtggatggagggttgcatgtggcagatgtcttgcggcatggagaaattaatctttatttttaaagtaacttttttatattaaaaatattacattttgttaaaatgtgatattagtgtcaaaattgtttccaaaaaaacaacaggaagtgcccgccacggcagggagtttttttggaggaaaaatcatcctgaaaacagggttgcaatgatacttaaattatttttccacaatatttagtattgattccgggttgaaaatccgttattgaagcccaagcctctgtgaggcaagtatgctggtcatctttccgttagatgattccgtcattactattgttatatattcctctgataatgaagaagacactcattacgctcattgctctggcgggaatggctcatgccgattttgtatggaacggcggtgagagcattacccaggagctttggcagacagaatccagctggtccatcaccggttcagattcctggccgtcggcaggaaccggtcccggcacgcccaattccaacgcatggtctcttatttccgtttccggtgcgaacggcagcatttcccagctggaaggctggacattgaagcttgccctgcaaaacggtgcggatttgactgtagggaacgtaaaaaaattccagggcggctgttctattgatattgatcaatcatctacgctgaccttcaacagttataacggcggcaatgatggtgggcgcacgacgttgaacaactacggcacctttaacctggcttataccaagagccagggcggggaaggattttacgccaatttgggagccacgggcatcatgaaccttacttcctccaacggtagtttatataccgccaagatagcaagcctgaccgctacgctgactcttgacggaggcaccgccagtggacttactgccagcgggcatcaaatcctgaccaggaacctggttaccctgggaagcaatatgtcttttgacagcacgaacacttccctggaaatgctcagcggcattgcaggcattgatacccttactgctgtggacgatttgaataatgccgaagtaggttcttatatggttaccaagaatgagaacgggtacagcgtttcctatgtggttcccgaacccgcagcggcttccctgagcctgctgggcctggctggtctggcgatgcgccgccgccgcaagtaacggcaaacttggattcctgtttccattcagctcccttccgcgattaacggaagggagttttttattatttccctgaaaggcggcgtatttccggaagatatccgggcggaacgggagagagaaggcaaaatccgggtggctgattcatactttttatggatgggccgctcgtgcgccacaatggattgctcgacatggaaaaaacgggacaatcaagaagctgcctgatggaagtgtcgaaattgaaaataagttgccttatgcctcggacgctatgtttaaggcgcttgtaccgtttgttcaaactaaagcattgcaggccaagaacttgaaattgcaccatgagtggcaaaggagaaacagggtatgatcctggatcgtgtcatcagtcatttgaggaatctcgggttacaggagttggtctttttcttactattccctggtgcattccggaggcttgttttgtaagaaaggatggaaatggattggccttcaagtgatgggttgcgagcaaaggaatagtctttgtcgccttatagaattgtccaaccaagggcgagtgcaacaaaaagcccccccctggttctgccagggaggggggaggtaaagaaatcacaggacaagcaggaaccgctatctgcgccgccttgcaagcaggctccccagtcccaggaacgccagagaggctgttgccggttccggaatctggctgatggaaagggaatgaacagtcatggaacagccattgcctgccgtgctggcccagccccccagggtcagcccgttcaggtaaagaactgacttttcataatggatctccgttttgttgaccagggccgtatctcccaggaacgcctccacgtaagtggaaccgttctcctccagaaaattgacggtaagcctgccggaataactgtccgaaacggagccgccctccccggaaacattcatattattcccattattggaaaaagcccacgtattggtagtggtggaaaaaccgaaagccgtcgtttgcgaattgtaggcgcccgcgctcagggaaaaaacgggaccgttgccaagatggaggtcggaaacgtccatcaccagggaataggaagcccgggacagggaaatatccagggaagaaatattgatccatgcccgttgggaagaatcggacagaaccagggctccgttctcaatggaagggccggcgccgaatttgtcaagctccacggagagcccgcctgtggtggaagcgccgttctccgtaaatgcatcccaggaagcaaggagctgggaagcctgtgagaaagaaattccccataacgcaagagtcaaaactacagtcttcttcataaaagagattatttgagaatattgagaagatgcggatttttaatccgcctgtcaaatctaacattgtttcacaggttgttagaaaaaaatcgggccattccattcggaaggaatatcatggacaaagattgtgtatccagaattcagagggttgatattcaatgaatcgtgatttccatccagctccagcggattaaaaatccgtgccccaaggagagaatgcttcgacgcgtgatgccgaataaaaaagccccctggccccggaggccagagggcgaagcctcctaacgtaaggaggtcaaacgatagcctcttttctcagaaaaaacaactcctaaatcattgtttcagtatcattatgtaaaaatgcgtactggaattgttattaaagaaggggaggctttgttcaataaaaaggagctgccccgatagaggcaactcctgaatggagtcaggggctgttaacatttccaggttccacctgcagcttcaatagcatcccgtacctgagctataagatagtgggggacattgtcattatcgtggcccgggatagtcaccgtctggccatgaggatgatcgtatacacgatgggaaacccgtccttatccttgctgcagaatgaatccggcatctcgtaatcgtctaatcagacctcgtattcgcataagtgatgttgaagatacgagaagaggggagagtttcaatgaacgctgtccgaatggaagaatcagttttttaatagttgaggattaaatgaagctggtggtctggataggacgagtattcggtatcttggagtagttgccagcggaagggcaaataaaacgctccaaaaagtcgggcagtatttcccgctaggagtcgcgctgatgaatatgatggagaccgtggtggatgtgatggattgctggcatttctaacatttcttgattccttaggaaaatttagtaaaaaataaattgctatgaattctattattttaggcatttgctgtgtttgtggattgggcatttttgcatatccatcattgtctgagtctacgcaggagttttcttctccggcggctcaacaatcgtttgtgcaatctggcgatattgccaaggaagttaacgagattgttttggtgaatgctattgagaacggcgttcaaacggaacaatatggacgttcttccggttgctctgttggttgctctactggctgttcaaccggttgctcctcgggatgttcttctggatgctcctcgggatgttcttctggatgctcctctggttgttcttccggttgccgtagttggtaattgctgatttgtatttccaggactcggttgtaataacaccgggtcctgtttttttatttatgaaacaatatcttttatggactgcgtgcggtttgatggcaatcggaggctttgggctgcttccgttttatttggcagctgtagcgttggtactcgctttgttgggaattgggaactacggtaagaataaggctactgctttttactgttgggccgtattagctgctatcatactggaaccgtctcttgcctattgttccagccttctggctgctttgttatttgtttccggacaccgtttattatctggatgttttttattttcccagttaccggtactattgggaccttgtttgccggttgcgtcttggtggtcttccctttatgcaagtggaattttatttgtgttgtttatgctggtctccgagaagttccgtaaaatatcagaaaaacttactgcgacttcccttgttttgtacgggatagctcttgttatagcgacctcatgcacttgggagctttctccggtaaatatggaaagagcagagcctggatatgagataggggcagccgtggaaaaggtgtctggaagaaaacaaaaaggggagggaaagctggtttataataataaagtgtatcaaaatgttaagccggaagggactgtttatttggatcatgacgcccacacggattgggatgattccaatttcatgcagagaagaccatggggacagaattttccgattgctggagagcctttacgcatggctataggtagggatggagcattgatttccaacctgggggcagctttgaagaaagattcttcacattttgtttatggcttaatggatgggtggagtgttgtccccttggctattagtttgggcgaaaaccttgttttagcggattctgattttgccgttaactgtctggcgccctatcaacaggcactgattcaaagaattacaggtacagacagaggttttatgttttttcattttgtttgtgctgcaatgcttattacaattctccgatggccgaagccctggcttactcttgtcttggttggtgtttattttttatcattatggtggcctcaagcaggcgatgtgcggtatgtaggacgtcaccatttatggcctcatactgatttaggagaaggccttgtgcgtgttttccagcttaatgggggtaatgtaagatttggctctatggggactaaagtcctggtggttgcagaaggtttttccgctaaaaggaataaagaaaaagttgtagttctggaaccaaaagcaaaagttagtatggatggagtggtttatgaagctggggatgttccgcagggagttcgggatggagttgtggatgcccgacttatttttcgtgaaaaagatgcgttaccttcttcgatttatcaggagaatggagtaattattatagcaacgggaactccttctttacttgatgtaaattatttatgtagttttttatgaatgttttccggtatgttgttctggcgacattactgttgtgtatgtttaatgcagcagtatgtttttatgttcctgggattgttgttttggctttatgttctgcggccgttttatgttttaggcaaaaatgggggcctaaagttcttctggatgtcggattgatctgtgtagcaataactggtttgctatggacggcaacaagagtgtccatgttattttttgcaggcgttgcagggatttttctaataagcgctgttgttttattttttacagggaagcgctggatagagatagttttacagagccttttaatggcgggagtagcttggtgtttgtttttttcttccatgccgcggttgcttttccatgcgttcaaagagcagagaatcgcttttctggaacatggaaattggggaattgctcaacgccatgatggttccctatccatccggggtcaatattcctatgatttcttgaaaagaattatttatagcgaagatgctgacgatctaaatgggattgaggatttctctgaattgtggctgatgactccgacaaagcctttccgtactgaagagattcaaaagatacgaaattgggtagctaaaggcggaaaactggttgtcattactgaccatacagatttgtttgggcattcaagtgccttgaatccattgttacagacattcggagtagaatctcagaagaattgtattttggatagaacgggagatggtggaacttactatgatgggttaagttcttttagaggtttaacggccaatagttttacaggaaatggcgaagcatggcttttccaaacgggtttttccgaacgtgccgattacagtaagaattcatttttctcagataatcaaatttctgatgaagaagaagctggaattcatgctgtgggacttacttctggatttgggcttggaacagtagttctattcggcgacagtacgctgtttgccaattttgctctatcaaggccttcttcacaagctcttttgcaaaaggttcttaatggtggaaggcctttccctttttatgccttggctaccatttgcctctttatttttattggtttcagccaggaaggaaagggcagactagtagcatttttgtctgccgcttttttaggtagttggatagtatgtttatggggaataccttcaaaaaaattgtgttatgattttaccactgctctagaggtacagggagattggtccatggtagaggataatggggctccttacgcgacactttttgccgcttctttttccaagtcagaatattttcccgtatggaagggaagttctactcagacggagatgatccagttttccaatgggatccgtttggagaatgaaaaggggaaagtatggaagccttgtatgtctttggataagcgtttccaacagcctccttccatgagtgttgagatgtttcttgaaacgcttatccgtgattcctgggtttcttctttctggtttgaggaaggtgtggggcctttgaaggatatggcctacggatgtttttggaaaaggattgcaggagagaaggagaatgttcagccttttattttttcctccccagaatttgttgattgtttttttatttccagccagaagaagaggatttcagttcgtatacgaattgtccgcattaaaggacagaagccttggattgttgttggggattggattattgggaaggaagtggagccaggagtgatcctcattcgtaagaactggcagcatccttcttggagagaaggggatattgtgttaaaatttaattcttaaaatagttagattcctttctttcaaataagctgcgagaacaccgaacatttgatcgaccattttttgatgagtcatcttttcctcatcctgagctaaatcaaaagaataaggaataaagtcagcggatacataggaaggtattttattccacttacagtatggataatggagtagaaaaagcccctgactcagaggccaggggctgaacaggagtgctttttttgagtgaccaggctgccggcggcagggaatgaaccctgccgtcagtagaaaggattatatcatgacttgatcaaatacagtgacttgttgcaacggctgatggaacttctgattgttctgctcagctaacaaaaaggccccggctgttggagcagccggggccgatgttttagaaaggaatcaatgattgagactacattgacctgttgcgtctttactatgccctttcctccggatttttcaagcgggcgtttgtcatgctttctcccggcgtttctatatatatcacggagattttgccgccgtccatgggctcgatgcctccaaaggcagggttaatgggatggagggtgtattccattttgccggtttccgggtttttcctgcggaccagttttttgagcgttaccccgcgttttcttctttggttggcgggggtatgcttgattttggttgaagcctgaccagtttcctgcctgtagcggttctcacgcggtattgtgcgtaccggtaagggctgttcggctttttatagatggaggccatgatttagtggtatcaatagtgtgctctttttgcaagttgtatcatcatgtttcaagacgtccttgtgtttcctgaaatttcacaagagctttgtttagagtggaataaaatcaaaaaggccgtctctggagagacagcctttttcttaaaactggtaggcccggtaggaatcgaacctacatcgtcggtaccggaaaccgatgtcctatccattgaacgacgagcccatgtttccaaggaacgagagaaatagaatagaaaaaacgggccggatgcaagtatttttatgccggtgacgggattggcatgatgaaaatgtggaacggggaagttaagggcagggaggttcccggatattccagggagaaggaaggggggatcaggagattttatgatgaaaagagaagatggctgccaggacggccgccacggtaacggccatgatggccgcgaaaagcggccagagatccagaaatccggctccttccagaaagatgcgctggatgagttccaggccgtatctcatggggttgagcagcgtgaagtcctggaagatttccggcatgctggagatgggcgtggcaaagccggagagcatgaccatgggcaccagcagcaggaaagttcccacaatagcctgctgaagggattgggcgaaggaggaaatgcacagcccgatggccgccgccgtgacgatgaagagcagcagggcgccggaaagcagccagatggagccctggaaggggatgcggaaccagaacatggctaccagcactacgaagacggcctgcatgattccggtgacgacggaggctgttcccttgccgagcaggatttcccccggggtgtatggggcgacgagaagctggtcgaaggtgccttcctcccgctcgcgggcgatggagagcgagccggagaggatggagttgatgagcacgagcacggcgatgaggccgggaacgatgaaccagcgtgtgatgaggttggggttgaaccaggcgcgggattccgtttccaccggggaggagccgccgtttttggagagcagttccgccccgtaggcggcagcgatttgctggccgtagctgagggcgatggccgccgtattcgtgttgcgcccgtccgcaatgagctggagagatgcgggcctccccgtctgaatgctgcgggagaaatccggcggaatggtgagccccacgacgatttcccggttgtctatcatgcggtcaatgtctttttccgtggccgcggcggcctggcgccggaagattcccgtgccttccaggtccgcgatgtattgggcggccgcttctccgccgtctttgtccagcacggcgtatggcacgcgggtgacgttcatggtggcggcatagccgaagatggctatctggatgatgggagggatgatgagggccagccggctttttttgtccctgagcacggccagcagttcttttctgacgagggaggctattctgatcaggaagtccatggcgctattcgagggatttgggtgctttcatcctggcgattcccatgagcaccacggcaaagacgcccagcgtgatgcagcagggaatgatgacggaagggatgtccccggccaggaagagggtctggagcagggtgacgtagtagcgggccgggatgaggtaggtgatggcccggacggcgggtggcatgttcaggatgtcatacaggaagccggacagcatgagggccggcatgaaggtgcccataatggcgaattggcaggccaggaactggtttttggtggcggtggagatgaccagccccaaccccagggccacaatcaggaacagggcggaaaccgccagcagcagagtgagggagccgcggatggggatgccgaagacgaaggcggcgaagagcatggagatagccaggctgaccatgcccagcaggaagttggtggcggccttggccgccaggatttctccgctgcccacgggcgtgacgaagaggctttccagcgtgccgcgttcatattcccgcgccatgaccagggaggtgaggagcgccccgatcatggtcatgatggtgacgatgacgccgggaaccaggtagtaatggctgtcgttggcttcattgaagcgggtgcgcgtctgcacgtccagcacgggggctgtccgcccgcccagggaagacgcccaggagccgacgacggcctgaaggtagttgcggatgagggtggcctggttggcgttgactccgttgacgacaatctggactttcgtggttccattgtggagcgtgtccggcgcgttgctttgcagggcgatgaaggcgtccgcttcatgggtgcgcagtttttcttcagcctcccgggtggagaagacgcgcgtggtctggaaatatctggaaagggtaagccttgtttccaggtccgtggactggctggaggcggggacggccaggtacgcgatgcgcacgtttttgatgtccatgctcatgccgtagccgaagaggagcaggagcacggccggaaggatgaccgcaatgcccacattgccggggtcccggaccacctggtggagttccttgacgatgagggctcctattcttttgagggaggcggtcatgtttctcctccttttttcatgtgttcttccgtgatggctaggaaggcgtcttccagagaagcgggggttccgtcttcacgcgggggagcgtgtttgcgtatatcgtccggggaaccttccgccagcgtggttccatccatcatgatgagcatgttatcgcaaaattccgcttctcccaggaagtgcgtcgtgatgatgatggtgacgcctttttccgccagggcgttgatgcgcagccagaagtcgcgccgggccagggggtccgctccggaagtgggttcgtccagaaaaaggatgtccggggagtggagcagggcgcacgccatgctgaggcgttgcttgtagccgccgggcaggtgcgcggcgggggcgttcatgtacggagtcaggtggaattcttcttccatggagcggatggcttcctgccgctcctttccggacatgccgtaggctccggcgaagaattccaggttttgacgcgtggtcagcatgccgtacatggaaaatttctgggccacgtatccaactttcctgcgcgctctggcggcggcggtccgcagatccgccccggccacattgagcgtgccgccgctggcgggcagcagcccgcagagcatgcggaaagtggtgcttttccccgctccgttggggcccagaaggccgaagacctgccctttgcggacggagaagctgacgtggttgacggcaatgaaactgccgaatttcctgacgaggtccgttacccggatgacggtgccgccgttttccgtccgctccggttccggcgttccggcaggggcggggatgtcctgcggggcgaggtccacttggtcggcaagcagggtcatgaagccgtcagagaagtccggctgcgcgggggcggggtggtattcctccagctttttccgtgcggggtggccgtggggaacgatgatgcggacggtgttcccctgcggggtggcgttgatgatgccgggcacggcggccagcctgctctggaattggcgcgcatgcagcccctccggcgtgcgcaccgtcacgcacatgccttccgcccgggcgatgacgtcggcgggaggggcgtccataagcaggcgcccttcatacatgatgagggttctgttgcagtaggccgattcgtccatgtaggaggtgctgaccagcacccccacgccttcctctccggagaattgtttcaggatgctccacagttcccgccgggagagcgggtccacgcccacggtgggttcatccagcaggatgaggggcggggaggagaccagggaacagcacaggcccagcttctgcttcatgccgccggagagctttcccgcaagccgcgtggtgaagcgttccaggctggtcatggcgagcaggttgcggaagcgcttttccctgtcctggccgtaaacgccgtgcatgcgggcgtaaagctccatgttttcccggacggtaaggtcttcataaagcccgaatttctgcggcatgtagcctatcgaggcctggatggaccggctttttttcacggagtccagattcaggacggagatagacccgccatgcggtttcatcaatcccgtgatgaggcggatcagggtggtttttcccgctccgtccggccccagcaaccctacgatttccccggcggacaggcggaaggagacgtcgtccaccgccgcaaaggggacgccggcggagtccggaaatattttccggacgttccggcagtcaatcaggggctgggattccgtggtcatggcctgggctgttccgggggctgtgttccggcgttctggtccagggggatggtgacggtggcgggggctcccaggcgcagccggttgtccggatcgtccacaatgatgcgcacttcatagaccagtgccgttctgagatccggcgtttccacgtttttaggggtgaattccgctacggaggagataaaccccaccgtccctttgaagccggtgtccgggaagctgtcattgcgcacggtggcggaaaagccgggctttactttgccgagctgggattccgtgaggtaggcccgcacccatttggtatggttcagggagatgttgtaaacgggtttctgcggggaggccatgtcccccttttccagaatgcggttgcgcaccacgccgttgccgggggcatagagcacggcgtctttcaggttctgctccctgatggtcaggctggctttggcctggttgtactgggccagcgcctgggctacgtcttcctcacgggaaccggccagcagcagttccagctgttttctggctacgtccagattggcggcggccacttgccgggaggcgacggcgtcgtccgcctcctggcgggagatggattttgtttcagccagcgcctccagccttttgctgcgcattccggcgttgttcagcgtagcttccgcggcctgaacgttcgccctcgcctgggctatttcttccgcgcgcgggccgtttttaacgcgcaggtagttttggcgggcggcttccgctatctgccgggcttcgtccgcggcctgccggagccgcaccgtttccagcgtggcgagcttctggccgggaacaaccgtgtccccttcgtccaccagcacggagtcaatacgttcggagatgaggaaagccagatccacctggcgcaggtccacattgccgtaaagaacggctttgtcctcgggcccggacggagttttccggtagatgagccaggcggccgttcctgccgccgcaaggagaaccaggaggataaccagctttttcataattttatttatacgcgtgtataatttattgcaagtaaaaatggagcccgcatgacggagaaggaattagcgatttactaacggagggagaacaggcataatccggcgtcttttacttttcccattatctgttatgatgaccgccaccgagatacgccaaagctttctggactttttccgcgaaaaacagcacacggtcgtgccttccgcttctttgatgccccagagccccggtttgttgtttacaaatgccggcatgaatcagtttgtcccgtatttcctgggcgtatggactcccccgtggacgcccgcccgcgctacggatacccagaagtgcatccgcgcaggcggcaagcacaatgacctggaggatgtggggtatgactcctaccaccacacgttttttgaaatgctggggaactggtccttcggggattatttcaagagggaagctatccgctgggcttgggagctggtcgtggagcggtggggattcccggcggaacgcctgtacgccaccgtgtacgcgccggacaagagcaagggcgaccccggagagtttgaccgggaagcttgggatttctgggctgagctgttccgttcccgcgggttggacccggacgtgcatatcgtgcacgggaatgtgaaggataatttctggatgatgggggaaaccggcccctgcggcccctgttccgagttgcacgtggacctgaccccggaggggaatacgaagggaagcctggtaaacaaggattccgaccagtgcatagagatatggaacctggtgtttatccagtacaatgcggagagcgacggctccatgcgcaatcttccggcatgtcatgtggataccggcatggggtttgagcgcgcgtgctccatcatgcagtgcacgaacggattcaaggatttttcccgcaaaccgtccaattacgccacggatgtattccgccccctgtttgaccgcctggaagttttgagcggacggaagtacgcggacgtgtatccggcgcccggttccaaaagggtggatgcggaggacgggacccttcaggaggcgattgccttccgcgtgattgccgatcatctgcgcacgctcagtttttccattgcggacggcattctgccgggcaacaatggccgtaattacgtgctgcgccgcattctgcgccgtgccgtgcgctatgggcgccgcctgggctttacccagccgtttttggcggaactggtggatacgctggtggagtccttcggacaggtgttcccggaactggccgcccgcgccgctaccgtgaaggaggttttgaaccgtgaagaggccagttttaatgagacgctggaccgcggcctggaattgtttgacgcggaaacggcttccaccggaaaggtgagcggcgagttcgccttcaagctgtatgatacgtacgggttccccattgacctgaccgccctgctggcggaggaacgcggcctggatattgatatggagcggttcaacaggctgatggaggaacagcgggaacgcgcccgggccgcccgcaagagcgaggtggtgcgcgccctggatttgaagacggacgccgtgacggagtttacggggtacgatgtggacgaatgcgccgctacggtgctggaagtgagccgccagggggattccctgttcatcatcacggacaagactccgttttacgcggaaatgggcgggcaggtgtctgatgccgggttgattgaaatcggcggggaaagctaccatgtgatggccgtccagcagatagggaatgcccgagcccatgtggtggaggtccgtcccgggctggaggtgaggcccggcgaccgcgtgcacttgagcattgacgcggaacgccgccgccgcattgaggcgcatcacaccgccacgcatcttcttcactgcgccctgcatcaggtggtcagcccggatgcggcccagcaggggtcctttgtttcggaagaccggttgcgcttcgactttaacagcagcgccgtttctccggaccagctccgcctgattgaagagaaagtgaacggctggattgaggagtctcttcccgtgcactgcacggaacgcgcttatgcggacgtgaagggcaatgccgcgattgcccaattcttcggcgacaagtacggggatgtggtgcgcgtggtccaggtgggcggatgcagggatgggctggacggggtttccatggaattctgcggcggaactcatattgccaatacgaagaatatcggcctgttcaagattaagagcgagggtgccatcgcttccggcgtgcgccgcattgaggcgatgactggggacgctgctctggaaatgatacggcagcatgttgttgccaagagcctggaaatcgccaaggcggtggagaagatcaaggaagttaattacgagttggcggacatggggctggaacaggtgcctgtccccacgattgaaggcaagccggggctgacggccctgggggcttccgatatccggacggtaaatgattccctggcgcgtttcgacgcctccgtggagcatttcaaacagacggctctggatgcggagaagaagcttaaaaaagcccgcgccgggcagtccgccgccaaggcagacgccctgctgaatgagtggctttccgatgcgccttcttccctgatccaggtggcggagggcgccggggaattgcttcaggagctgctgaacgggttgaaaaagcgccagtatgcgggcgccgccttcctgttgtgcgtggacagttcttccttgctcctgggcgcttattgtggcaaagatgccattgcggacggattgtccgccggagatatgatccgcgaggttgccgctcttgccggaggcaagggaggcggtcgtgcggaccaggcccgcggttccgctccgcaggatgccgatcctcaggccctggctgccgccgcccgcaatattattaacggataaaccccttacctgggccctatcggacaccaatcatggataagaagattttcccggacgaacctgagattcccattttgcctaatttgtttacggcagggaatctggtgtgcggttttttcgccattctgacgatttttgagggaatcaaccaggcggacagcgacgctgtggctgctttttcctattatcagaatgccacttttttaatcttcgcggcatgtttgtttgacttgtttgacggccgtattgcccgcatgcgcgggcaggacggcccgttcgggcgggaattcgattctctggcggatattgtctccttcggcatcgccccggcgctgctggtggccaaggccgtcctgttccagctgtcccctccggaggtgggttggggcatcggcatcctgtacctgctgtgcgccgcgctgcgcctggcgcggtttaattgcatggcggccgctccccggaaggaaggccagagcagcgattttgtgggtctgcccgttccgatggcggcgggagccgtggtctccaccatgtacctggtgatgtatctggcaggcagggctccggacggggccatggacctgggcgtcttcaaatacgtgattgcgctggcaatggcgggagtctccattctgatgatgagccgggtggtctatcccagcttcaagcatatcaacatgcgcacgcgggggacgatgtacgcgattgtgttcatcgtgctggcggtcatctgcattttcaaattcccgtgggtgatgcccgcagtcattttttccatttatctgctttacgggctggtgcggccctgggtggcccgccgctggcggaacaggctggaagcccgtgatggagaataggaagactttcagaaaactgttcctgcctcttctttgaacagaccatgctgcgccggattggtgccgggcggcggtgtctccgcagcccggttccgggaatgtccctgggtccggcttttttaagggcgggaacgcagccctccctttcaggaccgtccgcaattttcctgcgcggagcgtgcgccggaacggccgggggataaagattcggcgtccggaggaaagacggagaaggagggaaggggaggaatcgtcccgaaggaccggagcttatttgtttttctttttaaaatcgtccgcgaaggggtctttttccggggcggtgggcatggcgtgcgtttcaatgtccttggtgctcttgaccagcgtgatgcatacgggcttgctgcggttgcccatggcgtcataagtgtaaaggaagcggcgcacgagttccttggtgcgggaatcgaacatttgctcttctctcaggttggcgttgccgtcgtagccgtaacgcacgaaaaagagttcgtttttctgcccgtcaaagatcaggcaggagcgcagctctccaaaaggccctcttttgtacagggttacggaaacgaggacattgcggatgttgtaagtggtttttttcatcccttttccgtcccctgttttttcaaagtagctgcgggaaccgtcttcatgtttgaccatgcgggaagaagcggtctgaacattgaaatcgtcctggccggcggccagagctccggacgtcatgagcagggggatgaagagaagcaggggcgttgttttcatggtgaaaaaagagtttctgacttattaaagtgatgtatagtggctttgacaagaacgtaattagatgaactggcttgtaaggagagacgtattggatgtggcgcgcggaggcgtgctgatgggaattgtgaacgttactccggattccttttccgacggagggcgtttttatgcgacggaacgcgctgtctctcatgcaaaagagcttgaacggcagggcgcccttattctggacattgagggggagtccaccaggccgggggccgcggaggtttccgcggaggaggaattgggcagggtgctgcccgtggtgcgggaactccgttcatgcacggatgccgtgatttccgtggacacgcgccatgccgccgtagcggcggctgtgctggaagcgggtgcggacgtcattaatgatatttccggattgcgggaggaggggatggcggaattgtgcgctgaggcgcgctgcggcgtggtggcgatgcacatgcagggacggcctgaaaccatgcaggacgctccttcttatggggatgtggtgcgggaagtgcgcggctattttgaggaacgttatgattttctgctggggcgggggctggaaccggagcagatctgctgggatcccggcatcggctttggcaaaacggcggaacacaatctggccctgctgtccaacatggacaagcttcaggtggcaggccgcccggtgctgctggggctttcccgcaagcgcatgctgggcgccgtcctgggggatgcggagcagggacgcgcgccgctgagcaccgccgtgatgacggtgtgggggcatttgcacggcgcgcagattcaccgtgtccatgacgtggcggaatgcgcccgcgctctccggctgatccgggccgctgaaccgtttgtccgctgattgagccatggaatccgcttcttcccgtccggtattgacgtccctggcgtccattgcattttccctggcggtggtgttcctttttctggcggtacgggggatctggcctttcggaggccgcttcctggagtatatggataacgggcagctggtttatcctaccttgaagtattatgcctccgccctgatgtccggagcgtttgacggagcttttttttatgatgtcaatggcggcgcgggaatccgggtgagccctacgctgccgcatcagctgctgatcccctccacctggattgccgtggcgatgggggattccttcctgttgaaggacatggtctgggtgatgctggcggatgtggcctgcatctgcgtgacggcttcctggttcctgagacgcgtgtttccctccctgcccgtatgctggaccgtgctgctgacggcggggtatgccgtggggggctttttccagaccaagtacgggttcatgcaattcctggaccatgccgccatgttccccctgtttgccctgggcctttaccggctggtgaacgggggaaggggctggctgtatgccgccggcctcttcctgctggctacctccctgtacagcgctttcatggccgtcgtcaccggctggctgttcgcgtgggcctttacgctgcccctgaaggggacgcgggaacgccgcgtgcgcctggcccgcgtgttctggtacacggcggcggtaacgctggccacttgttattactggctgccgatggcggaaatgagccgggattccatgcgttccctgtttatgacgccgcccacgttttttgaattgtcatggccgtttgaccctcccaaattcctggaacgcctttacgcctgcctgccggggatgtcattcgccgctctggcggcggtttatctggcttgcgggaagaaggcgtccccggcgccggacagagggaggcgcctgtttatccttcttctggcggcgtccgttttgcccgcgtttgtcgaacccatccaccgcgccgcccatttatggagctacgtggattttcccgtccggttcggttttattcccaatctggcggtaatgtcgttctgcgcctggattttgtccggcggcaggctgccggggccgtcaggacggccatgggggtggggatggagcctggggcttcccatagcggcttttttcatttccctgtttgtcctgaagatgacggctgcagatcttgcggtgcgtcttctgcctttgctgttttttgcatgcgcatgtttgtgctggaggcatgtggagggcaaaaggctggcgtggtccatcgcttccgtgatgatgctggggctgcccataggggctgccgcgttctggaagcagggggaggaggagaaagcctccgtccaggcgctcaatgcggaatggctggcgcgcggcatgaaggggtattcaggcttgctgcgcgtgaaggacagggaccgcctgatggtggaaaacgcggattgcctggggcctgtcccgggcattggaaatttccggcatacgacgagcatcgggcatttccgttttctgaaaaacctgggataccgggatgaattcacgcgcacgtacggccagggaggcactttgttttccgatttgctgctgggccacggttttgtgctggcatcccggcccatggagggaatggagtgcgtgctttcccgggaaggcatgtatttatacaggcttccgggcgcccgctgggggctggtggttccccagggcgcgctggggctgcgtctggatgggaccgctgatgtgttcagcaatcttaatgccctgcacgccgcgctctgcccatcggcggaaggccccctttatgaagccgtaacagtgaggacggagatgagcggactctcttaccgcgcggccattccggaatatcccggcgcggtgtacgggttcccgcagacggatacggcggaactccgtgtcaatggatgtgcggtgcccgtcatggcggaggcgcagaagacatccggaggaacgagccgcacctataacggggttttggaattgaagcgtgcggccgttgccggggaaaccgtggtggaggggaggatgctgcggaccgtggagacgccccttctggcggctgcggcgcgtacgccggagcaggatgttccggttctggggaaagagcaggataagtacgggatggaggcgaaaggaagcggtggccatgtggaggtggcgctgaatgccggggaaggggaggctctcatggtgccggtcgtgtatgaccggggatggagagcccggcggaacgggatggaggcgcctgtggaaaaggtgggggaattgatggcggtgcgccttctgaaagggcaaaaccgggtggtgtttgattattatccgcctttattgaaagggtccctgctgttttcctccggagcggccgccgtcttcctgctgtatgcatggtgggcgcggcggcatccggaatccacgctcaggaggattgttctggcctccggatacaggctgtttcagtgctgcgccgccgtggtgctggcggctgtttatatggggtcaatcgtgttgtttatcgtgcagtccgtgctgtgacggaatacccggaaggcggggaaagaggccagggactgcgtgcggggggatgctggtgtggaacaatatccgcggggcggtaccgctcccgtttttccggttgccggattggcgggaaaaggctttccgttttgaaggatggttgacaggggaatctggcgcggtagagtggtttcatgcagtcttcctattgtccgagtccttatcgatatacgcgccgcgtaacccgtgaagtcatggtggggaatgtgggggtgggcggttccaatcccatccggatccagtccatgctgacgtccgatacgcgggatacggatgcctgcgtgaaggaggctttggagctggcggaggcagggtgcgagattatccgcctgaccgcccagaccaaggcgtatgccgccaatttggagaatatttcccgggaattgcgcgctgccggctgccatgtgcctctggtggccgatatccacttcaagccggatgccgcgatggaggctgccaaatgggtggagaagattcgtattaatccgggcaatttcgttgataagaagaagtttgaagtgcgggaatattccgacgccgaataccgcgaggagctggaccgcctgagggaagaatttacgcccctggttctgttttgccgggagcatggccgcgcgatgcgcatcggttccaatcatggctccctgtccgaccgcattctgaaccgctttggcgatacgccggaggggatggtggagagcgcgattgagtttgcccagattgcccgtgacctggattaccattccctggtgttttccatgaaggcttccaacgtcaaggtgatggtggccgcttaccgattgctggtggggcgcatgaacgccctggggccggattggaattatcccattcatctgggggtgacggaagccgggggcggagaggacggccgcatcaagagcgccgtgggcatcggctccctgctgacggacggcattggggataccctgcgcgtttccctgacggaggacgctgtgagggaggtgcccgtggcttaccgcctgtccaatcctttccagccgtcggagcgttccgatgacccggtttccttccctgaaccggagttgagctatgatcccctgaagttttccaaaaggcagggtgggctggcgatgtgttatggcgtgcgcctgggctgggaacagcctgtgcgcgtggcggttcctgacgccgggttttacgccctgcagacggaacgggaggcgatgggggacatgatgcctgaattatccctggggcagctggatgccattgaggtggatccccggtgcgatgccgatctggagccgttgaaggagctggcggaaccgtctattgttactgtgaagaacgggctggctatggaacctgtatatgcgttccgccttctggctgcccgtattgaggacaggcacctgatcctgctgaaggatacgctggtgcccggttccgtttccggggaagacgtgccgctgacggctgcccgcaatatcggttccctgctgtgcgacgggattggagacgctgtgctgattcagggcgagtcggacccccgtttggcttctttcctgggattcaatattttgcaggctacgggaacgaggctgacgcgggcggattacgtttcctgcccgtcctgcgggcgtaccctgtacaatatccaggaggcgacggcccgcatccggaaagccacggaacatctgaaaggggtgaagattgccgtgatgggatgtattgtgaatggccccggcgagatggcggacgcggatttcggttatgtgggcggcgcgccgaacaagatcaacctgtatgtgaagcacacgcctgtgaagttcaatattccccaggaggaggctgtggaacggctggtggatctgatcaaggagtatgggcggtgggtggaccccaagtgaggttttaacgttgaggaaacttttttgatgcggagagtgttcatcagcggcggtcacggcggtttggcgcgggccatcgtggaatgtttttccgctgcgggctgggagacggatgccccgagccatgccgcactggatgtgggagaccgttccgccgtacgccgctggtttgattgccatgccgcgtatgatttggcggtttgtgccgctggaattaccagggacaggccgttcctgaagcagacggaggaggagtgggacgaggtaatgaatgtgaatgtgacgggagccgcctggtgcggccgatgcgccgccgccgccatggtgcgggagaagagggaggggcaggtggtgatgatcggttcttatgcgtcgctccgtccggctctgtcccaggcggcttatgccgcttccaaagctgctctggcgggcctggtgaaaagcctggcgcgggaatggggaaaggatgggattcgcgtgaatctggtgttgccggggttcatgctgacggagatgacggccgtgctgcgggatagcgtgaaagaggcggctttgtcccggcatgttttgaaccggttgaatacgccggaacaggctgcggcgtttatcctgtttttacaggatgttcttacggcggcttccggccaggtgttcgatctggacagcaggattgtttaataatggacagcggatttattatccgcgttctcccctgctgatgatatatttccaagaaaatcatttttttaataaaaaagatagcctgctatgattttgaaaacaggaaatcttgaaaaacaaggtttttccggtcttttggaaagtgtgtaaacatggacagattcctctttccgtgtttggaattccatgttttcaacgggaaccggatgtccctggtgtatcaaattttttcttaaattattcttcttcaatattaaggcttgaacgcggataataaatccgtagaaatgtttctccatgagtttgccgctggctgatgatgaagagaaaggaaagcgtttttcctgtggttgtccggaatatatttccccgtcccggaattatggaatagatgccttgcgcattgtcgccatgatgatggttttaattcttcatcttttggcctccattgatgttttgtctttggagaaccatgggtccgcttcctataatgtcgggtggctgctggagattgccgcttattgcggtgtgaattgttatgcgttaattacaggatatgtgtgctgcgacggaacgttcaggtatgaacgtgtggtttccttatggtttcaggttgttttttatacatggggcagtttgctgctggctctgttgtttttcccccaggaggttcagttgagtaatattctgcattccctttttcccgttttatccggccagtattggtatgtgacggcgtatgtggggctgtttttcttcattccgtttcttaacgccctgggaaacaggctgaccaaattacagttccagtatcttctggttaccgttttcgtgctgttttccgttattcccaccctgcttcacacggatgtgttcccggtggaagaagggtatagcatctggtggctgggcatcctttacatgctggggatgtatgttaaaaagcatggcttgctgacgggaatgaaaacgcgtccgttatggatgttttatgccggatgcgtatgttttgcctgggttttcaagatggttcttaatgtggtgtctccatacctgattgggcagatcaagggcggtggaatgtttattcgctataattctccttttattgtagggacggcggttgccctgttgctgattttttcccgaatgcatttttcatcccgaagggctgtctcctgtatttcatggctggcggcagcgtcgttcagcgtttatgtgctgcattgtaatgctttgataggaaaatggtttttgtgggatgtctttgagtgggcagcgtcttcttcctcagccctgatggttgtgaacgtgttggcaatagccgccgtggtttatgccggatgcgccttggtggactccgtgcggcgttatttatttaagctcatgaacgtggaaaggggcgcccgggcggtgacgggcttttgcggaaagctggggcatgcattccggaagatgtgccgccggatagattcgcatccctaaggatgagggaatgtcctgttccggcggttccgggcggtttttgtctggagctgggctagtttttattatcgcttttatccaggaggggtttaagccagggaatgaccaggtcttttttgaagaaatggttgcgcgggtccacattggcgaaacggaaaaaggcgtccctgtccagacctgcgggcaattggctgccgtgccagcgttgggcagggtccgcaaaccggggctggtgatggtactggaaatgatccggcgccccggccatacggtaggctgcggagatgagctggaagtccctgtccaggccgccttccgtgcaaatgacagggcgcggagcgagagccgccacgatgtccgggaagtcgaattgtttccagaaacccggaatgaggtggcggatggagttgggagcggaacgcacgcccctgccgttgggcatggtcatggttttggcgcgttccagcgtgcggcacagaaagtcgttatacacgaaggcaaagatatccgggttcaggctgcccagaaccatcatgggttccgttcccagggagaagccgctgaggataatatggtttttttgcgcccaggggcgtgttttcacccaatccagaatacattggtccgcgtaggaggtgtagcccagccagctccagtccatttccagcaggaagcgggccaggttttcataatcgtgtgaagaacggcctgcggcgtgttccgcgtctccttcttcacccgttccggcattgtccaccacaatggccgcccatccctgcctgacataatggaaagccatggcgttgttgcccggctgctgtacggaaggctggtccagatccggtgatgtttcccccgccagctcttccttggtctggtctgacccgggaatgcagaatagcacgggaaccggatttttgtctgaagcgttgtccggcaggagcaccaggaacggtacggcggctcccgggaagggataggcttcccatttttccacccggtagtgttctcttggcacggtttttaccagaacgggggcggggatatccgcctggggggggaatttcatcagttgttgcatggctttccggactttttcccgccaggcggggaaatccttcggagccatatccggggaaaattcgcatgccggacgcagtttttccagcatggtctggacgatgccccgggaggaaacatgccgctggtcgctccgggatgaatgaagcaccgcccagtctgccgcccggaatttttcactgggcggggtaagggagaaggagggaagagaaagggatgccaatagaagagagaaaaaaacggcgggctgaatagtcatgaagccagattgccataaaagaagcttccattgcaaggttgcagcggtggtcttttcaggttgttcctgacgcatcggaagcttgagtttttccgggcagggcggtagtctggccgccgtcatgatggcggggggtaagagtcctggaagcccggaaccgcgggtatgcggcctgggcctggcttccggcttcggcatgggggcggcagtccatcttgccggggtaagggaagggcgcagagtgttgaagccgttgagcgaattgtggggcgaaggtaatccctggggcgatgtattgagcggatggattccagacagggaattgttatgcagccgcaggaacggccctgcttcccagctggcgctgctgttggcgcgccaggccgtggaggacgccggatggggaaggaaggaattgagggatgccgccctgattgtgggcagttcccgcgggaatgcttccggatggctgagcccgtggccgggacggcggcccatgaaaattttggccgttcccaattccctgcatagcgaacttgcttcctgcgtcagcatcgaattgggaatttgcgggccttatcacgtgctggcgagcggctgtgccgccggcctggatgccgtaggcatggccgccatgctgatgcggcagggagttgttaagagagcgctggctatcggtctggatttgcctttgtgccgggagctgctggggacgtactgggcctccggcatgctttcccgcaatggtttgaatgatccctacggccctctggccgacggcatgtgcatttccgagggaggggcggccatagccctggaattgtcttctgctccaggtatttatgtgaaggattatctggtgaattccgatgcctatagcccgctgggcatgccggaggacggaaagagcatagccgccctgctggaggctgctttgaaaagtcgggatggagcggttcctctgaccgtttgtccccatgccagcggcacggcggggaatagcgtgtccgaacgggctgctttgaaaagggtttttaaagacggactgccggatttgaggatgatgaagccgtggacggggcatgccattggaggcagcggaattttggaactggccctgatgctggtctttgccagggagggggtattgcctcccaatcctccctgggccaccttcccggaaggcggcgcctgttctgcggaggagttgccgttggccggggggcggatgctggtcaaatccgccgcttccatgggcggccataatgtggtgctgagtctggctgtggacggttgaatattgttgaatagtgaacgcttatgaagaatcctgaacagtttttgtcagagttgaagtctgcggggctgctgcgcgtcctgcgggatgtggaatgcctgcccggaggaatggcccgtctggcggatggccgggaagcggtcaatctggcaagcaacgattatctggggctggcccaccatccgtccctggcggaggctttttcccgtgcggtgcgggatgaaggggtcggagccatggcatcccgcctggtgacggggacgcggtgggaacattcctgtctggaagaggccctggccgctttgaaggggactgaagcggcggtcagtttttcctccggttatgctacctccctgggagtgattgcttctattgcggaccgggaggatacggtgctgatggataagttgtcccatgccagcctgattgacggggcgcgtttgtccggggcgcgtttgtctacgttcctgcataacgatatggagtcattaaggaaaaaactgcagcatttgcgggacgcgaatccttccggcgggattctggtagtgaccgaatccgttttcagcatggatggagaccgtgccccccttcgggaaattgtgcgtctgaaggatgaattcggcgcgttgctgctggtggatgaagctcacggattcggtgtgctgggagaacacggggccggactggcggaagagctgggtgtttcctcccggatagattttcaaatggggactttgagcaaggctgccggggtaagtggtggatatgtggcctgttcccgcgcctgggcggatgtaatggttaattccgcccggtccctgatttattccacggctccgcctcccgctttggccgccgccgccctggccgcggtggaagtgatccgcagcggggagggaaaggaattgcgccgccgtgtttccgtgctggcaaacagtttgtccgccgcactggggatgccgggaaggcctctttcttccattttccctgttgtggtgggagagaacgatgctgccctggctgcggcggatgccctgctggaacagggctttctggctcccgccatccgttatcctacggttccccgcggaacggcccggttgcgcattacggtaacggctgcgcatgaatccggacaggtcacgcggctggggacggcgttgaaggagctgctgcatgggaagtaacgcaggcgttgtttttggttctccgcattggagccggttcctgtttttatgcggggccttccggaaatgggattatcctcattgatgccgccataaaaggggaagaaggatatctgatgcctggcggaacggaatgacatccggatgtcctgaatggcagagcttgcatcttgacagggaagttttcttccagtaaggggaaagaatgaaggttcccaaaggaattttcactgaaccctataaaataacgtcatgatgaatacttctgattcttcttctccttcgtcctgctgcagcggttctccttcctgcacggccgctcttgttctcggcattatcgccttggtattggcattgatcggttttttcccgtgcctgggctggattactctgattcctgcggggctgcttgccattattgcactgatcatgagcattgtggctgtcagtaaaggttcacccaaaggggctctggttgttgccattatcgcgttggtcctgtccgccgttgcgggaattgtccaggcatggatggccagcgctaccgtgacttacatggaacagcaccaggattatgtggaaaagaaggctctggaaattcaaaaggagcttcggcagatggagcaggaaaacagggagtcattgaggcggtccggggaggcggatggaatgtcccctgcggatggaacaggctcccaggatttgtagttcctgaacctttttaggaagatcggcgatgaatggcgggcgctcttcatggcgttcatgccgtgatagctgggtggtcaggaaagtatggctgcctgtatgggctgttctgtcctgcctgttgctggcgccctccctcatggctctggcaattagccctgacaggatgaattctctggcggcttctgttgccgtgccgcatcgtgaatgcccgttgtgcggcatgacgcgagggtatgcggaaatggcccgcggggatatacgcgctgcctggggatggaaccgaggagctccggtcttgtttatggcaggactgctcaatggaggggctgccgcggtttatttggcatggtgctggcggagaagggcgggaagccgggaaaaggaaaatagttctcccgcgtagcatgccgcaaggggggaaccggcatcccctgtccccggtaaatgacacggcggaagttttgaagcggggcctgggaagttcttctgcctcctgtttattccctgtaacggggctggcgtctggtggggggacggaatgatgttgagtttttattgaatgaattccatgccaaattcctcgtagtgccgaagatgaagttccccggctcaggttgagtgttttgccggagggagctgcgttgttcctgaaaaggagaggggaatgcggcgccggcgtttcatgccttaggattattttttgtcaggaaggggaatagcttttctgggaacggccggtatttccgttcatgaaaggagtatccgggggtgtggaatattttgatttttctttatttcgatattttgttgataatgttgttttctattaagttgtgtaattttctaacatttttattctaggcccggttgattttatatatatagtttttggatattgtatgaatatttgcatgtccatctatagatcaatcgaattgcggaagaatacatccggaagttataaggtccggctgactatcgaccggggaagcaagttctgcggcgccaggaaatctctcggtctcggcacccatcgggaggattgcgccctaagacgtgcctacctgatgcgatgcctgctgtttcatatgggatggtttcccggcggaaagattgccgtcaggaattcagccgaatgcggtatcaaggatgtggtttgggacagcatggagtgttcggaggattccggaatgttcaagcttgccggcaggggaggccgcatggctgcggatgagaccatggccatctggttccagacgaatgaagacgggaaggtccagtgcctccgtctgctcatttccggatggaggaaggatgaccgggcggatgatttgagggtgctgattcagggaatgcggcattgcgcctcggaacagcgccagcatccctgccggattttgaatattgaaatcggcgccggctctttcgcggcatcccgggatgaatgtgtgctgaaaggataggaaaacggattgttcctgataccagtttatcctggttttattctgaagacgccacattccggttgggaaatccggctgtatgtccggcatgcctggcccggagttttttttgctcgtcattgacgacgggaaggttgtccgtattccgggcgaggcgaaggcgcgggaggaatggtgcgctgtctgccgggaaagggagttttgtttttcctgcatgaaaaaacccccggatggaatgattgccatccgggggtttgtttaagggatccggctattttttagcgggcagtttcacctgaatgtgaatgtcgcgcagctgacggtcttccgcggcggcgggggagtcgctcatcagatccgctccccggttgtttttcgggaatgcgatgacttcgcggatggattccgcgttgcaaatcatcatgaccaggcggtcgaggcccagcgcaaggccgccgtggggcggagcgccgaagctgaaagcgtccagaatgtggccgaattgttcgcgggcctgttcttccgtgatgccgagcgccttgaacatggcggactgcaggtcgcgttcatggatgcggatggaaccgcctcccagctccgtgccgttgagcaccacgtcgtaggcctgcgcgcgaaggtctgcggagagttccccgctgagcagtttttgttcgtcttccttgacggggcgggtaaaggggtggtggatggcgacccagcgctgctcttcctcatcccagcccaccagcgggaattcaataacccacaggaagtcgcgttccttgttgtccttgagcagttccatgaattcggcgcattgcaggcgcacgcggcccaggatatcgcaggagggttcccacgggccggcggcaaagagaacgaggtctcctgtttcgatgtccagggcttccgtgagtttttgcttttcttcgtcggaaaggaatttggagatggggcttctccagtcttcctcgcgcaccttgatgtaggccaggcctttggctccggcttccacggcagttttcgtcagggcgtcaatctggccaacggaggcggaaccgaatcccttggcgttgatggccttgaccacgccgccgttgcttacggctgaggcgaataccttgaagccgctgttttcaaagatggaggagacgtccgtcagcttcatgccgaagcggcgttccggcttgtcggaaccgtactgatccattgcttccttccaggtcatgcgggggaagggggtgggaatgtccacgcccagggattccttgtacacgcgtttgagcaggccttccaccaggttgtagatgtcttccggcgtgatgaaggaagcttcaatgtccacctgggtgaattccggctggcggtccgcgcgcaggtcttcgtcacggaagcagcgggcaatttggaaatagcgttccatgccggctaccatgagcagctgcttgtattgctgcggggcctggggcagcgcgtagaatttgccgggcgccaggcgggagggcaccaggaagtcccgtgcgccttccggcgtggatttggagaggatgggcgtttcaatttccagaaagccgtgctcgtccagatagtcgcgcgtggttttggtgacgcggtggcggatctgcatgttgcgggccatggccgggcggcgcaggtccagaaagcggtatttgaggcgcaggtcttcgttggagagggcccgatccagctggaaggggagcacgtcagccttgttgatgacgttcagggtgtctgcggagacttcgatttccccggtggggaggtccgcattggtcgtgtccaccgtatccgttttcaggcgggcggccacggtgccggaaatctggatcatatcttcggagcggagctgctgggaggctttcgccacatcctgattgacttccgggtgaaagactacctgcgtgatgccggagcggtcgcgcaagtcgataaatatgacgccgccatggtcccggacggaatctacccagccgatgagggtggtcggcttgccgatgttcgcagcgcgcaattcgctgcaggtatgagtgcggtatgagttcatctttattaaaaatggaagaaggggaaagaacggtgtcaattgcttccggtgagtgaagccacggcgtcaaacaggtcgtccatggcgacgggggatgaggtgcgcgcgcccaggtcgcgaagttccatgaccgggaattcatctcccacgatcaaggccgcacgggcgccggatttgacggccttctggagctgtccgttgactttggtgagcgtgaggggaaggtccacactgtatccctggtcccggagggcggaggcgatggcaagaacttccgcgcggcggctttcagatgcctgaaccatgaagatgtcgcagcctgcagaggccagcgccgcatctttcagtgccctggcatggggcgtctgttcaataaggtgggtgatgacggcatcccccatggcaaagccggttgccggcatgtccattgcgttgttggaaagggcgcctaccagcgtgtcgtaacgtcctccgccggctacggcgcgcaggctgcgctgtgtgtcaaagatttcaaaaaccagaccggtgtagtaggccagtccgcgcactacggataagtccagcttgacatagccgtccagcccgcgggccgtcaggtctttcatcaggatgtcatagcgttcggacgctccggcgggcgggttttcaataaaggccaccagatcgccgcggctgatatgaaaggcgtccagcttgcgctggcattcttccgggcggtcacgttcagatttatccacaatgccgaggaaagcgggaatatcctgttcctgcacgccgtgttccgaagcaaacctgatccaggcttcccggtcagagacgcgcacaatgaagtcgttttgcgtaaagcccagttccctcatgcagtcgatggccagggctatcagttcggaatccgcccacgcggaggcttctcccagaatgtccgcattgaattgataaaattcgcgcagacgccctttctggggtttttcataacggaagcatgagccgatttcaaaccacttgagcggtttggtgtattcgcgctggtaggcggctgcgatgcgtcccagggaggcggtgagttccgggcggatggtgatgtcccggtccccctggtccgtgaagcggaagagctgggtgggcagctcgcctccgctctttttaagataaagctccgtggcttccacagtcgggccctcccattccaggaatccgtaacgatgcgccaccttcttccatgcgttgaaaagatagttgcgcacggcgcagtccgccggtgcaaaatcgcggaatccgggaagtggttgaaagcgagcgtctggcataacctggaaaaaaggatgttgtctgaggacgaaacagtttacagaattcctatgccttggcaagtccacatgcttatgatgaaggaatttcggtggaaaccagattaatgaccctatgcaggaggatggggacggttattccggttttacatgaagtgagggaaatgggaaaaggattaattattggcgattttagtgttttttaaatgatccggattttttgcgcgggctatggggaatgaaggtttaagtgcctgcggatttgtaaccggatgtcaaacaacgatattgaatagcaaggggaaatgataagaaggtgttctcaaaagtttttctgcgtatggagcatttcatctttccctttatagaaaaatattttcctcccgctttaaaaagaaaaccggggcagttttgtttgatttcataggagtatgacgtgaaacgaatgagttttttttctctttgggaatctaatatcagtattgattatgtgtaaagaatgtggatgcgggggggagctctcccatgaaagtcacggccacggcatggacgtccatgttccggtgttggatgccaatgaccggctggcagagcgcaacagaggtttttttgctgcaaaaaaccttttggttatcaatgttttttcttctccgggggcaggaaagacttctctgttgcagaagacggcggagatgctccgcggccgtgtgcgcataggggttatcgtaggggatttggcgacggataatgatgcggaacgcctgagccgagcggatatccccgtggtgcagattacaacgggcaccatgtgccatctggacgcccgcatgattgcggaggccatgaagaaaatgcctctggacgatctcgacgttttgattattgagaatgtgggcaatctggtttgcccggcttcctatgacctgggggaaggagtgcgcgtggtgctgctttccgtgacggagggtgaggacaagccgttgaaatatcctcccatgttccattctgcggatgttgccctggtgaccaagtccgatctggcggatgccgtggattttaaccgtgacgccgccctggctgcactgaacaaggtggctcatcatgcgcacgtgattgaggtttcttccaagaccggcgaaggaatggaggcctggtgcgaggagattgtggaacgtgcgcgccgcgcccgggaaggcacgattcagcatcatggccatcaccaccattgaacaggccgccgcggcattgaaatttgagatagccggcatggttcagggggtcggcttccgtccccatgtgtaccgtttggcggtacggcacggattgaaggggtttgtgcgcaatacggagtccggcgtggagattcatgtggaaggggagcccggcgctccggagcgtttctggaccgcgctgatggacggcctgccggagcatgcccaggtttatggagtggagcggaccgtatgcgagcctgccggttttgaggaattccgcattgaggaaagcgattccacccccggaggcgttccggtgatgctgccggatctggctccgtgcccggagtgcctggaagaaatgcacgacccttcttcccgccggtatcattatccgtttaccaactgtacgcactgcggtccccgttattccattattgagacaatgccgtatgaccgcgcgggcaccagcatgaaggggttccgaatgtgtccggagtgccggagggagtaccaggatgtggaggacaggcgttttcacgcacagcctatcggctgtccgtcctgcggtccttccgtgaaggtgctgttttcagatggttcaggactggggttcggccatgggtttgatacccccgcggcacaggcggcatgggtgctggcggacggtttgatcgtggccctgctgggcgtaggaggttttcaattgctggcggatgcttcttcggaagctgccgtcaggcgtctccggcggttgaaggagcgtgacgccaagccttttgccgtgatggtgccggatgtggctgcggcggagaggctgtgccgcttgtcggaggaggaaaggcgcctgctggcttctccggcctcccccattgtgctggcccggggggggaaggatgtggatctggctccttccgtgtgcatgttcagccgttttgtggggataatgcttccgtcttcccctcttcatgcgctgctgatggatgtgtggggaaagcctctggtggtgaccagcgggaacctgagcggcgagcccctgtgcatctccgtggaggaggggctggagaaactgggccatgtggcggatgtgtttttggtgcatgaccgtccggtagtgcggcccgtggacgattccgtggtccgcgttacggacggcagggccatgatggttcgccgcgcccgcggatatgccccgcggcctgtgtggcgcacatctgcggcggctcccgacgtgctcgccctgggggccggactgaagaataccatctgctggctgaaaaggggcgtggctgtcatgagccagcatctcggtgacctgagcagtgcggtttccctgaacgcttttgagcggacggtggaggcgctgggcagaaccctggatgccgttccgcaggtaattgccgtggacgcccatccggacggccccacttttgtccttggccggcgtctggcgcggaagtggaatgcaacggttgtccctgtgcagcatcatcaggctcatgtgctggcctgcgccgtggaaaatgaaacgccgtttcccgctttgggcatagcttgggacgggacggggttcggtacggacggaacggtatggggaggggaattttttgtgttggaggaagagggtgagccgcgcagggtggcccgcctcaggccgtttcttcttcccggtggggacgaagcggttcgggaaccttcccggtgcgcctgttccctggcccgtcagatggggccgtggcgtacgtacgggcttgataagcgtctggagaggggggtgcctgtgcggaaacgcgaggttctggaggcgatgatggcccggaatatccattgtccgtcctcctcgtccatggggcggttgtttgatgccgtggctttctggtgcggttttgacggtgcggcggggtgtgagggccatgccgccatgatgctggaatcatgggccgcggaagcttccggggaaaaaatgccgggggacgcgtatgaatgggtcatgcatgaagaagagggattgctggaactggattggcggccgctgatgaagtctgtggatgaagatttgttggaaggcgtttcccgcggctgcatcgcccgcaagtttcatgagagcctggtgaatctggtttttgatgtggcggagcgtttctgcctggataggctggtgctgggcggcggatgttttcagaatgcctttttgcttgaaggactggcggggatggcccagtctagaaggtaccagttgtctctgccccagcgggtgccgtgcaatgacgggggaatttccctggggcaggttgcggcggtcgtacgccaatggaaaggatagaatatgtgtttggccgttcccggaaagattgtgagcgtcaatgagacggaccctttgttcagattgggggtggtggattttggcggcgtgacccgtgaagtgaacctggcctgtgtgccggaagccgtgccgggggattacgtcatcgttcacgtgggcatggccctgagcgtgctggacgaggagaccgctcttcaaacccgcagggaaatgagagaaattgtggaaaatacggatccgctgtagggaggggcgttttccgaattcaattaatgatttatgcaggaggaagtccggcagctgattgaagaattgcgccacgctgtgacgcgtccgtgggcggtaatggaggtatgcggaggccagacgcatgcgattgcttctctggggctggaggagttgctgcctcccggcctgcgcctgattcatggccccggctgtccggtctgcgttacggcggtggagttgattgaccaggccgtggaattaagcctgaggcccggcgtggttttgtgcagctacggggatatgatgcgggtgccgggctcccgcggggatttgttttccgccaaggccgggggagggaacgtgtttttgatgtattctccgctggaagcggtcgcttatgccggaagccatccggatacggaagtggtgtttttcgccgtaggttttgagacgacggccccggctacggctcttgccctgcagcaggcccgcatgctggggtatgccaatttttccgttctctgcgcccatgtgctggtccccccggctctggaatggctgatggaccaggatgagggaaggccggacgcttttttggctcccggccatgtctgcgccgtcacgggggaaatggattacgtgcgtttggccgcccgttaccggacgcccatggtggtgacggggtttgaggctccggacctgctccgcggcattttgatgtgcgtccgccagctggaagccggggaatatgcagtgcggaatgcgtacggacgttatgtgaaacccggtgggaacacggcggcacaggaaagaatgaatgaagtttttgagccggaagaccgccgttggcgcggtctggggatgattcccggcggcggcatgaggctgcgccgtgagtggaatgacatggatgccgttctgcgttttgaatgcggaaaggggaggccgggagcagatgaagcttccggatgcctggccgggcaggtgctgagggggctgattcgtcctggagaatgcccttttttcggatcgtcctgcacgccgctggccccgctgggggctcccatggtgtccggggaaggggcttgcgccgcttattatcattataaaagaagttgatgccatgtttgagtgtcctgttccggagcctgtttccgaccgtatccagatggctcatggcggcggaggccgcttgatgaatgagctgatccgttccgtgtttctgagcgccttcgggtgcccttccggaggcgtgcagaatgacgccgccgtattggagattcctccggggaggctggcgatgacgacggacagctttgtggtgcagcctttggagtttcccggcggctccatcggttcactggcggtgcacggaacggtgaatgatctcgccatgagcggcgcggagccgttgtatttgacggcgggctttattctggaagaagggcttccgctggaagtcctggcccgcgtggcacaagatatggctgccgcggcccgtgcggcgggcgtccgtattgtgacgggggatacaaaagtggtggagcgcggaaagggggacggcatttacattaatactgccggggttggcatcgtgcgccatgggttggagatcagcccttcttccgttcgtccgggggattccgtgctgctcagcggggatttggggaggcacggcatgacgattatgagcctgcgcgccgggctgtctttcggagacggcctggaaagtgattccgctccgttgcatgaatccgtggccgccgtcattcgtgccggcattcccgtgcattgcctgcgtgacgtgacccgcggcgggttgaccgccactctttcggagattgcggaatctgccggcctgacagtgaagctgaatgaaatgtccattcccgtgcgtgaggatgtcagggcggcgtgcgggctgttggggctggaccctcttcaagtggcctgtgagggacgttatctggctgttcttccacgggagcatgaggaagaggccctgaacctgatgcgcggctgcggcgtatctgccggagcctgcgtcataggccgggtggaggaattggggacggcgcccctgctgatgacgggacttcttggagtggagcgggtgttgacgatgccttcaggaatgcagcttccccgcatctgctgattcctggtgctgcatgattggcgttttgtggcagggaagcggtggaacccgcttccctgccggtccggtgtttcataggggtgccggagcggctctgtgcgcttccgggggaaagcgcagccggcttgatatggggaactggttgttgggagatggttcaggagggagtgtctttacctgtcccggcatcgggcaatgcttttaatgccgctttggcctgtgcatggtcctgggaggctgccttttccagccattcccgggcagtttccaggtttttttccacgccgaatccgtacaggcagatgattcccatgttgtattgctcggaggcgtagccggctctggcggcgcgaagattcctgttttgccattccctggcttccgcttccgtgaagtcctggctcttgcagaattggtcccacgtttttccgaatttcatggcagccctcgcaaatcccgacagggcggattttctggtgtattcatccgccaggcgcatgtttttttccactccgtcgggtcccagcctgtacaggtgggccagtccccagtatccgttggggctgcccagatccgccgctttttggaagagctgcagcgcgtccgggtattttttatgggacatggcgaataccgcattggccaggaagcgttccgctttgatgaattcgtaaaattcgggaatagccgcccattcggatttaagtttgttcctgtctttcctggatttgggaggcatgccggaaggcggggatattcggaaaacgggaatgtagccggaagcgcccatattggccagcccggccatcagaaagcagcccggctggaggcgccacatgtgcatgtacaaaacgcgctctgctggcagagattccttctcaatccagtccggcaggttcatgggggggccgtaaagtcccgtcaggccgttcagcatgcgcttgtacagggatttcaggcgcgtatcgtattcctctttacccgctttggtggtggagtaaaaggaaacggctttcagacctccatcctttccgtactcgaaatgcagggagaagaaaaggcctccaataggttttttcgtcttgtaggctccgttcagccctgtacggctcaggtaggcgtctgtttccggcccttccagggatttgcaggttttcagggaattcagaagctgggattcctgcaaacctgtttccagggggccgtaaagaggcgaggcggcgccgcaggaagctgtataaagcacagccatgtagcgatagcaattggttaatttcatggaatagatagggcagggatggaagtggtgcttcaatagcggattaggaatccgaatgaagtgttcaaagatgtttttatgaaaagcaagtatattacaatcaatagtttatattttgttccaacaaatttattttgttgagggttgtgtccgggaaaatgatggatgattttggagaaatgcatttggtatgaaaaactgatattgacgtcggattcctaatccgcagtgtttaaaataggttgaaaaatgttggttaacctttttgttatcagcatattaaaaatatgcatcctgttttcctgaagtgaaaaaggcggaaaggcgcgtctgttgtcccgcctcattcttccgttttttttacatggaaattgttattatttttattaaaagtctttctgaatattcattcatttccgttttgtgtatcccatatgcatgcattgtggcggatttcaaatccgcatgtcagcgaaaaaaggaactggtgcttccttattgattttattatcaatggataaaatcaatattggggattgtttctttcaggatgcgttgtgatttttttctttctctatacgatgaaagtccttttttctcaaaaaatttgattgactgcggatttgaaatgcgcagatgaacgcgcatggattgagagcgtttgatattcaatgggctgtttctttttttgcagtaatacgcagttttggaagatgtcctgataaaaaaagagggctcatgatacgtacccgtacgggaaaaacgggaaggccgtggcggaattgctccggagcggctgttgattttgccggggctgcgagcataaccggatgtttgtgacggtttcgtttccggccgcatcttgtttgaggaagccattccgctcatggtaccggtacatgagaattgatgtggtaacggatacgtatgaacctgatataaatggagtggccctgacgctggggcgtctggtcggcggcctccggatgcgcgggcatctggtgcatgtgatgagggcttctgaacggaacggctctttcgaccctggggagacggctatgccgtcccttcccctccccatgtaccatgaggtgaagatagggctgccttctgcagacaggttccgcgccagatggatgaaaaaaaggccggatgtggtatacgtggctacggaaagccccatgggagcgtctgccgtgaaggccgcccgtacgctggaggttcccgtggtgatgggattccataccaatttccaccagtatatgaaggattaccatttctccagactggaaacggccgccgtgaattacctgcgcaaactccacaacagggcagggatgacagtggttcccacggaggaaatgcgccgtacgctggaggggatggggtttgaacgcctttccgtcatggggcgcggagtggatgccgtcctgtttgatcccgccaggagggatgcttccctgcgccagtcatggggcgtctggcgggatgaagtggtatttggcgtcgtggggcgtctggcgcgggaaaagaacctggtgacggccctggggctgtacacgcgcttgcagagggagtttccggattgcggcatgaaaatggtggtggtaggggacggccccatgatgaacagcctgcgcagtgagtttcctgatgccgttttttgcggaatgcgccgtggggaagacttggcgcgccattatgccgccatggacgttttgctgttcgccagtgagacggaaactttcgggaacgttttgctggaaggcatggccagcggtttggctacggtcagctaccggtatgccgcttccgcggatgtggtgctggacggcatcaacggccttcaggcggagaaaggggatgaagaggggttttattccgccatgcgccgtctgctggaagacggggagatgatccggaggcttgggaaacaggcccgcaggacggtgaattccagaacttgggattccatccatgacaggtttgaagaactgctggcttccgtggcccgggaggaaaacgggaccggctgcgcccgccccccgcgggatgccgtgctggaatgccgcacggtttttttgtcggaccttcatctgggaacgaaagactgcaaggcggacgaatgccggaagtttctgaaacatgtccgggctggaaaaattgtgctggtgggggatattgtggatgcctgggctttgtcccgcggcagccgctggcggcggaggcatacgcgctttgtccgcaccttgttgaaaaagatggaacaggaggatgtggaagtcctgtacctgtgcggaaaccacgatgatattctggaaaaattcctgccttttcatctgggcggtttggaaattgccagggagtacgtgcaccaggctgcgggtggaagacgctacctgtgcgtgcatggggacggttttgacgccatttccaccaatcaccggtggctggcgatgctcggctctctgggttatgacgttttgctgatggtcaaccggttttacaacaaataccgcgcctggcggggcagggaatattattccgtttcccgcgccatcaagggccgcgtgaaatccgccgtcaattttatcggaaaatatgaggaacagcttcaacgcctggcggtaaagaggcagtgtgacggcatcatcgccgggcatgtgcatcatccggcggataccatggtgggaaaggtgaggtatctgaattgcggggactgggtggaaaccatgagcgcagtgctggaatatggcgacggccgtatggaaacggtgctttacaaggattttatgaagcgcctggcatatggcaaatgcggaaccatggaggacgcagaaacttctcccggcacgggggattcatgacggaacggcctttatccggttccccccggaagtgggacaaaatgactttgtgtgacattttgtctcttttctggtgtgacattatgtcccgtttttctttgtcgggaaaatagaggaatgaaaggaaaaatagcgtaatatgattataatatgacatttatgtttatttttcagtatgccttgccagattggcatgccatttgcaacaaaagaggcaagaatatgagtttgcctgcatgatgcttcaggtcatgaggaaatcaaatctcaacgaaatccattcaaaacaatctaaaataacgatatggctaaaatattaggaatcgaccttggcacgaccaattcgtgcatggctgtgatggaaggcggtcagggtaccgtacttgaaaacagcgaaggtgcgcgcaccactccctccattgttgctttcaccaaaagcggtgaacgcctcgtggggcaggccgccaaacgtcaggcggtaaccaacccgaaaaacaccgtgttttcctccaagcgcctcatcggccgtaagtacagtgaactgacggaagaagataaaaaggtgccgtacgaaattgtggaggctcccaacggagatgcctacatccgcgtggatgtgggcggtgaaaagaagaccttttccccccaggaaatcgcttccatggtgctggccaagctgaaagccgatgcggaatccaaacttggcgaaacgattacggaagccgtgattaccgtccccgcctatttcaatgacgcccagcgcaacgcgaccaaggccgccggtgaaatcgcaggccttaaagtgcgccgcattatcaatgaaccgacggcggcggccctggcctacggcttggacaaaaagtccaatgaaaacattgccgtatatgacctcggcggcggcacctttgatatttccgtgctggaaatcggcgacggagtgtttgaggtgaaggcttccgacggcgacacccacttgggcggcgatgactgggacaacgcaatcatcaactggattataggcgagttcaagaaagactccggcatggatctttccaaccagcctgacgccattcagcgcatcaaggaagaagcggaaaaggccaagatcgccctttcctccacccagagctatgacatcagcctgccgttcatcacggcggacgcttccggccccaagcatatccaactgacgctgagccgtcccaagctggaacagctcacggaagacctgctggaccgcacccgcaagcctgtgctggactgcattgccgcgtccgggttgaaaaccggggacattgacgagctggtgctggtgggcggcatgacccgcatgcccgccgtgcaggaaatggcccatacgctggccggcaaggaaccccacaagggcgtgaacccggatgaagtggtggccctgggcgccgctattcagggcggcgtgcttcagggggacgtgaatgacgtgcttctgctggacgtgactcctctgaccttgtccattgaaacgatgggcggcatcgccactccgatgatcgaacgcaacacgaccattccggtgcgcaagagccaggtgttctccaccgccgctgacaaccagcccgccgtggatatccgcatttgccagggcgaacgcaagatgtttgaggataacaagctcctcggcaacttcaagctggacggcatttcccccgctccgcgcggcgtgccgcagattgaagtgacctttgacattgacgccaacggcattctgcatgtatccgccaaggacaagggcaccggcaaggagcagaaaatttccatccagggctccagcggcctttccaaggatgaaattgagcgcgccaagcgcgatgcggaagcccacgcggaagaagacaagaaacgcgctgaggaaattgacaccattaaccaggctgactccctctgcttctccgtggagcgccagcttaaggatatgggggacaagctgcccgcagacctcaagcgtgaaatagaagacaaggtaacgcgtctcaaggaagccgtctccaagaaggacgtcacggcgatcaaggctggcaaggaagacctggaatcccgtctggaagccctgtacaaggcggcggaagccgcccagcagtccgccggggcagccggccccatgccgggcgcccctgccgaagaagagccttccgacggtccccgcaaggcgaaaggccgcgtggtggacgctgaaatcgtggacgacgataaataagcaacccccttcccgccggagggggaagcaattccccctccggcggaacattacatcccgtattactcatctacaacaacatcaaaaaacatactatggcaaacatcaaacccctaggacaacgtgtgctggtcaagcgcattgaagctgaaaccaagacggccggcggcctgttcctgccggacaccgccaaggaaaaaccccaggaagccgaagtgatctccgtaggcaccggcggccgcgatgaaaaaggcgccctgattgaatttaccgtgaagcccggagaccgcgtgcttatttccaagtacggcggcacggaaatcaaactggacggggaagactaccttatcctgtctgaaaacgatattctggccatcatcggctaaatggcaccacacacacattcaacatcattttaaatatttaacattatggctaaacaaatccaatttgacgaaaccgcccgccaggctctgctccgcggcgtggaacagattgccaaggctgtcaagagcacgctgggccctgccggccgcaacgtagtgattgacaaaaaattcggttcccccctcatcaccaaggacggcgtaaccgtggccaaggaaattgaactggaagacccgtttgaaaacatgggcgcccagcttgtccgggaagtatcttccaaaaccaatgatgtggccggcgacggcaccactaccgctaccgtgctggctgaaagcatttaccgcgaaggcctgcgcaacgttactgccggggctaaccccatctccctccagaggggcatcatgaaggctgcggattccgttgtggaagaactcaagaagatcagcaagcctgtcgactccagcaaggaagtggcccaggtcgctaccgtctccgccaactgggacgctgaaatcggcaacattatcgcggaagccatggacaaggtgggcaaggacggcaccatcaccgtggaagaagccaagggcattgaaactacgctggacgtggtggaaggcatgcagtttgacaagggatacctgtccccctacttcgtgacgaacgcggaaacgatggaagcggtgctggaaaacccctacatcctcatccacgaaaagaaaatcaacaacctgaaggactttcttccgctgcttgaaaaagtggccaagagcggccgtcccttcctggtaatcgcggaagacattgaaggcgaagccctcgccaccctggtagtcaaccgtctgcgcggcgtgctgaacatctgcgcggtcaaggctcccggcttcggcgaccgccgcaaggccatgatggaagacatcgccatccttaccggcggcaagtgcatcacggaagacctgggcatcaagctggaaaacgtgggaatcgaagacctcggccaggccaaacgcgtggttgtttccaaggatgaaaccgttatcgtggaaggttccggcaaatcttccgatattgaggcccgcatttcccagattcgccgccagatcaaggacaccacgtccgactacgaccgcgaaaaactccaggaacgcctggccaagctggccggcggcgtggccgtcatccacgtgggtgccgctacggaaacggaaatgaaggaaaagaaggcccgtgtggacgacgccctgcacgctacccgcgctgcggtggaagaaggcatcgttcccggcggcggcgtggcgctgattcgcgcccagaaagccattgacaccctcaaactggaaggtgatgaagcaaccggcgcccagatcgtttatcgcgctgtggaagccccgctccgccagctggcctgcaatgccggccgcgaaggagccctcatcgtcgccaacgtgaaaggcatgaagaatactgccgaaggttacaacgtggccacggacaagtatgaagacctgctttccgccggcgtggtggatccgaccaaggtgacccgttccgctctgcagaatgcggcctccatcgccggcctgctgcttaccacggaatgcgtcattgctgacaagcccgagaagaagagctgcagctgcggctccggagcttccgacatgggcggcatgggaggaatgggcggcatgggcatgatgtaagccccgtccgtttcttcgagaccaaggcaatcggcttcaaggctccccggtttttccggggagccttttttaatatgcttcatcaggagccggtttcgggaaaaaagctgcacaggatgttcagagtttagaaaaatattgaatgattatagaacatatttgtctaatcataacatgaaaaagctgcataagaacatattgtttgcggcggcggtactggccatgccttctgccctggccgatatcccggagtcttccgttccggctgccgccgtttccagtatcaagggtgcttatccgaacgccggtcccattgaatgggactctgaaatgcatggcatggaaaggatctacgaagccgaatttagaattaacggattccagtttgacgtgaagattgctcctgatgggaaaattgtgaggattaaggaagaaatagctgcttcctctcttccggaagccgtccgtgcgtccgttttgaagcgttatccgggatgccggattaaggaagcggaaaaaattactgaaggagaacttgtccgttacaaggtggaagttgcggacagccgtgacgattatgatgtgctgattgcccctgacggaaatatccttcatgtggaccgttaggctttttgttttttacatttaatgaaagcgggaggagggcggaagaatccgctctcctccttttttgaggatcggaagcaggggcgtatgggaaaatgtgacggaatgttcacgttttaaaacgggcgtgcgggagcggcctcctgtaatagagggccgtttactacgcatatggacccgatctattactttatcataggactgatactggtgttatcctgcttcgacctcgttgtcggagtttccaatgacgccgccaactttttgaactccgccgtcggttccaaggccgctccgcgcaggacgattgtgctggtggccgctttgggtatcatcatcggctcgctgttctccagcggcatgatggaaatcgccagaagcggcgtattcatgccggcccggttttccttccatgacatcatgttgatctttctggcggtcatgttgacggatgttatcctgctggacgttttcaacacgttcggccttcccacttccaccacggtttccattgtttttgaactgctgggcggagccgtggccgcagctctctttaaaatttggtccggggaaccgggagtcgctcaggaattgtccagctacatcaattcctccaaagctctggcgatcatctccggcattttttcctccgtttttatcgctttcatttgcgggataacggttatgtggatttcccgcctcatcttctccttcaactatcaaaaatccttcaaatacctgggcgccgtctggtgcggcgtggccctgacggctatcacctacttcgccattttcaaggggctgaagggaagcacgctggtcaccaaggatatgatccgccacctggacgcccatatctggctgtacgtttgctgcagcctggcattctggaccgtcctgatggccgtgctccagaatctttgcaaagtcaatatcctgaaagtatccgttctcgcgggcaccatggccctggccctttcctttgccgggaatgacctggtcaacttcatcggcgttttcatggcggggcagtcttctatggaaattgcggccgccgccgcagtgcagggggcggaccttaccactctgtccatgggcggtctgatggcccccgtcacggcggattggcgttacctgctgggggcgggcgtcatcatggtgctggccctcatgttctccaaaaaggcgcaaaccgttacggatacggaagtcaatctggcgaggcagggcgggggagtagagcggttcggctccgtccccccggcccgcatggcggtgcgctatgccctgaatgcttcccgcgcggtggaaaaaatcatgccctcctgcgtcgggaggtttattgaaaaacgcttccggcctgtgccggaagggccggataacggtgcatctttcgacctcattcgcgcttccgtgaatttgacggtggctgccctgctgatttctctggccacgtcccttcggcttcctctttccaccacatatgtgacgttcatggtggcgatgggttcctccctggcggacaaggcctgggggcgggacagcgccgtgtatcgcatcaccggagtgattacggtgatttcagggtggttttttacggcctttgccgcgttttccatgtgcttcattgtggcggcctgcatcctttatggcggtctcttcggcatcatcgccatgtgttcgctggcggcttttctgcttctgaaaagttccaggctccatcgtaaaagaacccaggctgcagctcaggcgcaggccgccaattaccgggatccggctgccgccgcacgctacaatgaggaaattattgaactgatgaagcgcatggcggaaatttatgaaatgaatctggaggccctgaacgtggaggacaggaagcgtctgaaaaaactccggaaagaagcgcgcggcatccgccgttccctgagcgataaaatggcgatggaagtcatgcccgtcgtccgtgaactcccggacaaagaggccgaccgaggcaagcgctatgtgcagatggtggaatacgctacctccgtctttgaatccctctccaacattactacggccagccatgcctatatagacaacaaccatgaagggctggatttggaaaggatagagcttctgcggggaatgaacagccgtgtttcctccctctacccccgtttccgggaaatgatggaaagcaatgactataccgggttggacgaatgcctggcaggcatggacgccctggatgaggaatttgcggaagccgtcaaacagcagattattctgcgtccggaagacgcctccgatatgcgacgggcgcttctctatctcaacctccttaatgaaacccgggcaatgatccgcaaagtacttcttcttgctaaaatccagagaaaatttgttcttggctggtagcctctccctgtaattcacgtccgtgccggcggcgaatgcttccggcgcggacatcttgcccagactgttcccgtattgggagtagctgccaggtcttttttattcacacggaacaaggcttctttacggataaaccatgtcttctgcctgtgggacaatgtcttgaaaggccgtttccaggcgttgccatgtatgttgccgtctcaagaaaacaaaaaacgcaagctttgataaacaataacttgcggaacaaattggtacgggcgatgggaatcgaacccacgtctcaagcttgggaagctcgcgtcctaccattgaacgacgcccgcatgaaatgcggatgcctatttagcggcagaaggtccggatgtcaagaccacagaaaaaacgtatcctctttttttgttattttgacgcagtaatgaaaaaaaacttgtcttatcccgtgatttgaacataatgcgttcgttgcgcgggtatagcttaatggtaaagctccagccttccaagctgattatacgggttcgattcccgttacccgctccatttttttattaaattcacctgctaaatacttcctttatgaaagccaggttcgtgacaaaggcggcgcttagtgcgctggcacttgcgtttgcgggtacccttcccggtatggctcagcaaactgcttctccggcagccgctccggctgttgatcaggttaaagcctccgctgttgaaaaggcttttatgaagaaaatggcagatattgttcaggccggattgaaagccggtgctctggatatgaaagcggtgtccggagttttgaacgatgccgctaaggctggtgtgtccgatcatgtgatgggtgcgatggtatccatggctgcgggcgctttcccatccaacgctcctgccgttgcttccgccgctgtccggagctacgggcccggggtgaaggaagaacaggtgcgcaatgtgatcgcttccgctgtttcctcccagccccatccgtatgcatccgtggctcccatttcggaagcggttgaaaaagctttgggcaattctccggtagccggtactgttccttccattgctgtggccgtggctgcccagactcctgataaccccctctcaggggtaactgtccaggaacatggcctggtaaagcctgttgaagatgttgccgggggctccctggttctgccgggcggtcttcctgtgggcggcacgcccaccagccccgctcccgtgtccaatgctgctggcaattaacctgattcttatttaataaaatagcatgaagagtcttttttatctctccctggtggccgccggcatgtttgccgtccatgccaacgggcagtctctgtacacgctggcgggtccggttggtctggaagagtcccttcctctcaagtggttcttcaacctggcgggagggtatgacgacaatgtcaacgcctccaattataacaagcaggaatccgcattcatcagtacggacatagggtgctccctggccaactacgatgccgtgacccaatattctttctccgccaagctggggggtattttttacctgaaagaccttgatggcggaacgaatgaagccctttccaattccacgctgtccgccaaactttcccatagttttgaccagactttgcgttataacggcagcgtctcctttgcatggcagccggaacccaactattccaacggtattgccaatgcccgccgggacggcgactacatttacgtgtatgtttccagttccgtgagcaaggcgtggacttcccgctattccacgacgctgggtgccaatttctccatgatcgactatcaggaggattccgccaagacggataaccgcgattatgttggcatgaatttcaccaaccggtacaaatggacggaacgtctggctgtttccctgggctggacgggttcctactgtaatcgcgaatacggcaataacgaattttccaacttcgtcatggctggcgctgaatatgcggtgagcgaaaatacttctgctacgctgcgcgtaggtcctcagttcaagtatgtcgagaactacggaacaaaaacctatccctccgcggaattcggcttaaaccaccgcttgagcgaccggttcatgctcggaacgttcgtccgttattccaacgaagcggtgaatacctatatcccttacaacggcgccagctattactccaatgaaacgtggcgtttcggggtacacagcacgctgaagctgacgcaccgcgtcagtctgaattgcggagtaaacctgattgccagcgattatacgcgtccgagttccatcagcaacagtgacacgtccaacctgactttcaatgctaccgccggtatcaagcttctgctgacgaatgccctggcccttacggcccaatattcctacacgaacggttcctacagcggctataactacccgatgccttcctacaaccgcaacgtgttctccttcggcgtgaattacagcttctaagtcttgactgaccattaatgcctttactcctctaattgcgaattttcattcacaattagaggagtttttatcttactgccttactatattccatgagtgcccaggatcagcagaacagtgatcgcatcgtacgcaatattgactatttgcaagttttaaaaaatcgctggaaggaagtctttcttgttttccttctggtgctggtcatttccgtggtagtgactttcctgatgccgccctcctaccgggcgaccagccagtttcagattaaactgcccaagcctgtgatggatataggcagggggggggacgtggttgccacttccaacgtgacggccaactacattcccatgcagtattccgtgctgacttccgccgaagtgcttaaagtggtatccagaaaactgaaccttgccgcggaatgggggatgacggatgaaatggcggcgactaatctggccggcatgattaaggtggcccctgtgcgtgccacggaccttgtggatgtcattgtttccggtccggatcccaaactggtgcagaatattgccaaggcggtgcctgaggcgtacaagcaggaccgtgaaatgcgcgaaaaccgtctggtggaaaccgccatcaagagcctgaaggatgtcctccgggaacaggaggatgccgtcaatgaaaaaatgatggctctcaaaaagctgattgcggagagctcctacctgcctacgtcctggagaaacggtgaacaccgcagcaccctgacggccggtatggaagaagaggaattccggaatgccaaagcgcaggccatggattttgaaaggagggaaaaggaactggcttcctatgtgcaggaattgcagcgtctgcccgacgacaagttgctggattacgtgatcagttccgacctgctgaatgcggagactgtaggggcggacgctctccgtaagacctatgctgaattttccgacaagctcaaggaaaaggaaaatctgaaatcccagaatatcggcgccaggcatcccaaaatgctggcgctgctggaaacggaaaggattctgggggataagctgaacaaggaattgataggcctgcgttcttccctgaagagcaagctggaaatggttgccgcaagccggaagcactgggaggcgaccgttgcccaaaaggaagaggatcttcagaagcacgtcctgcaggttcccatgtatgaacaggccagccgtgattatgacgctgcgctggaccagcttaaggaactggattcccggtacaaagatgagattgcccgtttgcgcgtaccccgtgaggcaattgaaatgtatcagctgccgacctatcctgctgcgccctacaagccgaatgtgaccattaacctggcggtgggagcgggtgccggtctgttgctgggcatcggattggccttgcttctggaattcatggatacctccgtgaagaccatggaagatgtggaacgggctcttcaggttcccgtcctgggcattattcccaagaatgtgcctattctgcattcttccgatgtcatggggccggacgcggaagcctaccgcattttgcggacgaacatagaattcaataagaaagggctggaagaaatttccctgacctttgtttccgggagcgccggggaagggaagaccaccaccctgtgcaatctggcctatatttgcgcccagggggggtatgccaccctgatgattgacgccgacctgcgccgttccaagcttcaccggtattatgagctggataatgaggtagggctgacttcctacctgctggaagattatcctctggaggaagtcatttttcagacgcccattgaaaacctgtacgtcatgcctgcgggacccactccctttgacccttcgggcgccttgaattcccgcaagtttaatgaattgctgcaggaagtgaagcaacgttttgacattgtgctggtggattcccctcccatcctgggggtcagtgactccgccgttattgtaagcgaggtggacatgactcttatggttgtccagccccgcaagctgccgctgaaagccctgttgaggcagaagcaggtaatcgagtccgtgggcggcaacctggccggcgtggtgatgaataatgtggacattacgtccgatcaccagtatcagtattacacaacttactattcctattattctgcggatggcgcttcctccggcgagaacgcggatgcctcttccatgaagaaggtggaacgttctggaaaggccaaggagctggcagccacccagtcccatgatagcgaagatttgtattaacccattgctccatgaaaaaatatatttgttccatcctttgtcttatgctgggcccggcggggctgggctccgcccagtctccggatgccgtgccgccccagggcaccattgaaatccaggtgcgcggcattcccgccgacgacgctaccgctatttccgggcagtatttgttggacgggaacggaacgatacgcatgccccagctccctccggggcaggatgtgctgcgcgtggtaggcaaaacggcccgccagattgaagacatgctgatggccgcctacaagaaggcggagctgtacacgtcccctacgtttttggtgaaggtgcagagttcggatgcgcggctgacggaacacatcgttctggtaagcggcggcgtggctatgaagaagaatgttttgtggcggcgcggcatgacgcttctggaggcgattgtgggcgccggcgacatcacggactggggatcccgctacgtgcaggtgacgcgcggtgggaaaaccgtgacgtatgattatttttccattaaggacagggcgattcccatccagcccaatgaccgcattttcgttcctcagcgcgggatttttgaagggcgcccggcaaaacttcttccctgaggcatttttcccatacccggcttcccgcaaggaagccgggtttttttattgggccggttttcatgatgggggaaatatcggaaaaaacgcggatggggaaacggggggcggagtgaaggggcgtgtcgtcagcggttgatgaaaccgggaggtcttctcatgctcccttcttcaggattcttgccggaaatggatgttttcggggaggccgtatggtggaatcgcggagggaaggaagttgtttcctgaaagcttgcggtgtcggaaaggaacgcctggaaaagagggaaaatttgtttccagaccctcttgtttatgggaatggaaggcttgagatccggaaaagattaaggggggtaagtttcccgatgggcgcgtaggcccttttcacatgattggccggcatggtctccgggcatatattgcggtgaaatgagtttagtatgaatgtaaaaaacagaaaaacaaagaaaaatgttgaacattcttaaactcaatgcatttttggaatctccaaaatatgttagagtttcgtgcggaacggctgcatgaggcttcgtaaatccaatgtgaaaactcgttagtcatgatataccgttttaagaaaacattcatcggcgtgggagggcgtgaatacattagcaatcccaaattgagcttcccggaacatgtcaaaatccgccgccgcggaacgaatcccaggtccggccagccttacacggaggcgggtagcgcatttgtggagacatccgccgtcgcggcacggctctgctgcagcgcttccgccgcgcgccagtatctgcaccgccacggtgtccgtttccgggtggtccgcaagggtacgggccccctggccctgtactggcggcggctggatgtggagcgggttcttgctggccgggagcccgtgcgccgccgcgtgcctccgtgttatatggatatggccggggctgtcagcatgctgggagtagtgcgcagctatgtttacaggctggtgaaaaaagggctgctgcgtgaatacaggtgcaggatgaaaacagcccgtggactgcgcgtgcgctgcttttaccaccgggaggatctggaacatgtcaggctgcacgtgctccagaaaagatgacggaagcggttccggaggatgcgtttttggcttgcgcgcaggccggattgtgtcacgttaagggtatgatagcttttctgcgcggcacggtggcggaatcatatccccagcggttgatcctggatgttcatggggtggggtatgaagtgattgtgcccctgtccacgtttgacaggctgaatccccttcccggcagggagctgacgctgaaaacctacctgcatgtccgggagaacatgcaggtgctgtatggttttgccacggatgcggaaagggatattttcctgctgctgattgagcgtgtttccggaattggcccggcaacggcgattgccattttgggttccctgtccgtggagcagttcaagcaggcggttgtgggcggagacgtttccggcattgcgcgggccaagggggtgggcaaaaagacggcggaacgcatcgtcctggaactgaaggataaagtgggcctggccgccacgtgggaagcacaggctcagggcgctacttcccaggccgccggggacgcggaattggcgctgattgcgctcgggttcaagcaggtggaatcccgcaaggcgatagccgcccatctgaaggactatccggatgcggacgtggacgagctgatacgcgccgctttgcgctccatgaattgaaggagcttccggaggaaggagggcgtttttacaagtttttgattttcatgaaggagtatgtacgtctggcggagtgttccctgtttgcggaagctggggaacatactgccatgatgggggaacaatagtgttgacggctggttgaaacgtttttaaacttgcagcgtccatggtacttgaataagtccgggactagtaattaatcaaatctgaagccctcaatcttatggccaaatacgctattaacggttttggacgcattggtcgcaacgtactgcgcgccatgtccaaggaagaacgcaacaaggttgttgccatcaatgacctgactcctatcgaaacgatcgcccacctgctcaagtatgactccacgcagggcaagtttgacggtgaaatttccatcgagggtgattatctggtcgttgacggtcacaagatcctcatcaccgtggaacgtgatcccgccaaccttccctggaaggatctgggcgtggacgtcgttctggaatccaccggcctgttcaccaagcgcgacgccgccaagaagcaccttgacgccggcgccaagaaggttcttatttccgccccctccccggatccggacctgactttcgttctgggcatcaacgacagcgaatacgatcctgccaagcacgacatcgtttccaacgcttcctgcaccaccaactgccttgctccgatggtgaaggtgctggacgacaagttcggcgttgaaaagggcatgatgagcacgattcactcctacacgaacgaccagcgcattctggaccttccgcacaaggatccccgccgtgcccgcgccgccgcgatcaacatcattccgacgaccaccggcgccgccaaggccattggtgaagtaatgccgaacctgaagggctccctgaacggcgcttccttccgcgttccgactccgaccggttccctgaccgactttgtggccgtgctcaagaaggatgtgaccgtggaagaagtaaacgccgccatgaaggaagccgctgaaggcccgctgaagggcattctggcttactccgaagaagcgctcgttcttcaggacatcgtttccgacccccactcctgcatctttgactccggcttcacgtatgtggtcggcggcaacctggtgaaggtctgcggctggtacgacaacgaatggggttactccaaccgcgctgcccaggccatgaagaagctgggcgacagcttgggctgcggctgctcctgcggcaagtaagttctttcggacaacgcttgctcttcagttgcacgacaagtcttgccgtccgcctgtttcaactttccggctttcctggccgggtttgccgggcgggcggggatttatccgggagggcagaaatgccctcccttttttattcattgaaccagacaatataaaccgatatggctaaacttactgttcgcgaccttgacgccaagggaaaggaagtcctcatgcgcgtggatttcaacgtccctctcaaggatggggaaattaccaatgacgcccgcattgtggctgctctccccaccatcaagttcctgctggaccagggcgcacgcctcgtccttacctctcatctgggccgtcccaaaaacgaacccgatcccgctttttccctgaagcccgttgccgcccgcctttccgaattgctcggcaaggacgttaaattcgttcccgccgccattggcccggaagcggaagccgcccgcgccgccatgaaggacggtgatgtggttctgctggaaaatgtccgtttttatcccggtgaaaagaagaacgatccggagttcgccaagtccctgctgggcaatgccacgctgttcgtgaacgatgcgttcggcacggcccaccgtgcccacgcttccacggaaggcgtgacgcattttgcggaaaagagcgccatgggcttcctgattgaacgtgaactggaatacctggaaggcaagctggaaaacccggaaaaaccctttgtggtgattatgggcggcgccaaggtgtccgacaagattgaagtgctttccaaactgatggaaaaggctgatacgttcctgattggcggtgccatggccaatacgtttctggcggctgaagggtatgacctgggcgcttccaagattgaaggggacaagctggatctggcccgggaaattctggcggcggccaaggccaagggcgtgaagttcctgcttcctgcagatgtgcgcgtagccatgaaatttgaagacggcgccgaaaccttctgcacggctcctttcgctgaaggcggcaaggtgccggaaggcggcatggccatcgacatcggcgataaagccattgaagagttctccgccatcatcaaggatgccaagaccgttctgtggaacggcccgatgggcgtgtttgaaatggactgctttgccaagggaaccaaggaagtcgcggaagccctggcggattccaccgccatttccatcgtaggcggcggcgattccgtgacggcggccaagaagttcaaggtgcaggataagctttccttctgttccacgggcggtggcgcttccctggaactgctggaaggcaaggttcttcccggtgtgggggccttgaccgacaagtgctgctgcggcaagtaactgttcatggccgggcggattgttttcgcccggcgttcagaatgggctttttcattccccgcacccgttttcgggtgcgggatttttgatttgccggcttccgttgaaaaaacgcgggagttttgcgattccggctttttgaagaaggtgggaatccatgcttatgccgtctttccgttccggaaaggaaggcagtctttttttgggcttgctcttaatatggtccccggtagtctgagcatgatgaaactgctgcattgtttcctggctgtcctttggtggtgttctcccgctccggctgcggatattcccgatgcggagaatgcggaatatggcgggtatcccgggcggtatatgcttttggattcttcctcgcccgaccggcagagcctgtccactcccgtagctgcctatgtccatgacaatgggatggaagtagctctcattggtgctattcatgtggcggaaccggaatattacgaccggctgaataagctgttccgcaggtatgatgtgctgctttttgaaatgattggcggagagggcctccggcgggaagaggaactgcgccgcaagatagaccgcagcaagccgctgggggggctgactttggaagaggcgcgggaatggaaccggatagtggaatggaggaagaaatgcgggcaggaggaaaagtcttttttaatggagctgctgggaggcgcctacaaggagttgagcgacatgctgggactccagacccagcatcagggcattgattattccgcagcccattttgtccatgcggacatgacgctggatgaattccgcaaggcgcaggccagaaagggtgaaagcattgccggcctgatgcttaaatccgtcttgtcctccctggttgagaaaaccgggacgaaccgggccggtgaatttggattgatggcggatttcctggccggcaataaaacggggttgaagaataagctgatgggcatgatggccaatgctcctaatggtctggagaataccgtgattctggaaggccggaacgccaagtgcatggaagtgtttgaccgttggagcggcaagggtgtgcgcagaataggcgtcttttacggagcggcgcatcttcccggcctgcacggtgctcttttggaacgcggctaccgtctcagggaggtgcgctggcttccggcgtggagcaccagggagaagggtgcggacgggcagcgcggagagggctgagttttttactcttttttcgagacgggcggtgtagcggcggatgaacatggttttccgccgctccgcctttaaagagggaagaagagggaagaagagggaagaagaggggggcgttttttccctgcctggggcaggatgccgctctctagggggcaggatgccgcgttccggagggaaccatgcggacgattcctccgcctttgatgcgcatggtgaaggaaagggcattttcggaagtgactttccgggtttccacgctccatccgtcatttttttctgccagatcccggagaatggtggcctggtatgccgtgtttttgtccaggaaattcaaaggaatggaaacggtgcgttccctgccgtctccgttcatcagagcaatgtaccactggtttcctgaccgccgggcgaaggcggcgcattccccaatggcagacggcggaaggacgatggtttcctcccatacggaagggatgttccggacaacttcccgttcaggggaatccttcgggaaagcagcttccatgtccgcggggttggagacccagtgaagaatgggggacgtataaatgatattggccgccatttggagggtccaggaagagccgcgcagcttggggccgtggccaaaatagcctcccgtgaaatcggcgtggccggagaccaggcgggtaaagggcagcgcgcagtagtgctgcccgccaatggcggcccagatgttctgttctccgccgtaaatgccttcccgactcatttcgtgcggccaggaacgttcctcccccgtgggggtattggctccgtggaagttgaccataagcttgtttttcgccaggttttccgctacggcgtcgtagaagtccaggcgttcctgagaggcggagtccatgaagtctatcttgattcccctgattcccgttttggagagtgagctgaaaaagcggcgcatattttcccagtcattggcggggttgttgacgtctgaccatcgcacccatacccagatgcctacgtttttgccggcggcgtagctggccagtttggccagcttgtccatgctttccggaagtgatcggctccattttttccacccttcgtcaacgaggtggtattcccatccgaattcggcagccatatcgacaaaggcatattggtcgttttccaggacattcccgcggtcccaccaggtccaggtggagcggcccggcttgatccagggggctttggaaccttccggaaaaaggtccctgtccggttccggagccagggaagggatgacgtcgttccggaccagtccgttcaggtcgtcattcaccaggatgacgcgccagggcatttccgaggatgagggggcggaaaagccgccgggatcctggaaatataccgcgcggcatgctccatcctggagggaaaatttaatgccgctccatttcctgttgaagttggcagcttcctgtatgagcgcgacgcctccgcccggcagttccgccgtaatcggcatggtgcggacgcagctgcggggattgccgggatcttttttgaaatccgttattctggaaggagaccagaccccctcgcaggggcccagggcggaggaggcgtcctgggtccacagaacggttttttccggaaaggcgaaggaggttttttcttcactgatattcagcgagggcgctttcttcacctcttccgtcaactcatagcggaaggcgaccccgttgttgaagacacgggcccggagccggagggaggagttcttcccggaaaccacgtattcattgaagcagacggaagaggtggggtatttgccccgcgtctcgaaggtgtcgcgaacgttatccttcactttttccacattccatcccgtgatgcctccggcgaggttttttccattcacgacgacgcccagcccggatggttccagaatcgttttgccgccttttttcagagaatgggcggcctggctgcccgcgtggagcctccaggagagccgcccgtccggagattgcagggatgcgtgcgtttccgccgcctgtccggcgccggtcaggaggcatcctgccgtactgctgagcataatgagtgattttacaagcatatctttatcagaatacgtccgtctttgttcatttattgcaaaacagcgaatcggaaattggaacatccatgttccgaaggagggaaaatgccgttccattggaggcatccgggcaatttccggaataaaaagggaaagcctttttttcttcccacatgaatttgtagcggtatgccgttttttcgtgaaggccagggatcatttatgaagaaaaaataatagatatcttatgttcctgtgcagatagttgcaggaaaataccggattggcagggagcaaaagaataatctttacaaaataataggaagcaatagaataaagcgcattgcaaatataaggatggagcgtagcggtttaaatagtgatcctgttttttcggactaggatgagcattccgataatgtttctgtacgcagctcctccaaattacttcctcccccttcctggaacgagtcttccgtttattccaaggaactcccggcgggagcaactttggaacattataaaatcctgaaggtgctgggcagcggagggtttggcattacctacctggtgcgggacaccatgctgaaaagaaaagtagttcttaaagaaaactttccttcttcttatgcttaccgggatccgtttacagggcgcgtgatacccaacaatgaacacgatgccgagtctttccagtggaccctttccaactttttaaatgaggcccgtgttcttgcacaactggattcgcccggtatcgtacgggttctttccgtgtttgagtgtaacggaacggcttatttttccatggattacgttcagggtcttcccatggattatctgggagagcagcagcttcttgcggggaactgttattccgaggccaagttgaaggggctgctggtgcacatcctccagattttggattaccttcataaaaaaggcatctgccacagggatatcaaaccgggaaatatcctgcttacgcaggaagaggctcccgtcctcattgatttcggcgcgtcgcgccgtatcgagagcaaccatacccagaccgttctggcgacacgtggtttttcttctccggagcaggcgctgggcagaaaagatatggggccctggagcgacctttattccctgggtgctacattttattccctgctgaagggctttgcgccgcccagaggggaggaacggctgatcaacgacaccatacagccgctggccgcatcctcttcgttgtcttccaattattcgaaaaattttctgaaaaccatcgacaaggccctttctccgcgtgtggaagaccgttatgcttccgcagaagcgtggatgaaggatctgagggttgagggaggcgccgtttcaaccattcagttctcccccgaggagttcaaatcagcccgtaagcgttttttcaatttgtttgccttatcctcttcccgcattatgtcggaagggcaggaacatttgaggacgagacggaagatagcgtttgggatgattattgtcttgggaattgtgggcgcgctcctgggatattctattaactggggaaacagaacggagaatgaagatgctttagggctgcattttcccagtgtgatgtccactcccattccccagattatttcagattcaagggatgtgtcattgttaagttccatggatcattttgacgtcaggctggatagcccgtccttatcgcgtcatgctctgccgtccgtgctgcccgaccgtttttcacttgcgtgcgttcatttaagggtgcttcaggaagacaagatgtgcccgcccctgtatctgaccatacgtgatgagcaggggaagctggtttcccggtcatttaacggtttttccttcaccttgattgagagtccagtgcttacaggattccgttttgtcgatctcccggcgctgaaagtggatgccccttacagattcagttttgagaccagggataatgttccccatcctttgaaggtggtttcttcccagattacgacgctggagagcgggaaagtcctgaagccccatttcaaattcatctgcgcggcgtatgatcccagtgtgaaagcttctctggacagcccggagaacagcaaactccgggaaatgcttatcgcttcccggaaaaggaaccgtacggaaattgattccatcgtactgacggagcgggagaaggttcagttgcggaaattcgccagggcggggtatccttccgcccagtataaaatagcccgtcttattttcgaacgggatggaagatatggggaagaaggtggcgcctggctttataaggcagccatgggcggctttattgtcgctcagagggatttggcgtttcttcttgtaggcggtaaggagtttttcccggatattcttcagtgtccggtcagcctgtcccagaactattcccaggcggttgatttgctgttgatgtcttttacggcgcaggatccttccgccctgtacatgctgggcattttgtattcccaggggtggggggtggattattccgcagagatggtcatgaggctgtccaaactgttggccggttccggttatgatttgtcgcggctcactttgtccgcccccattttagcccattgggagcttctgggtcagcaggagggaacttatacgcggatgtgctgttccattccggacaggaagatgaaccaattttcaggcgtgcgtctggtgcggacttccaaagaggggggaagtctctttattgacaaggtgatcctgctcggggacgggcaggaagttatgtcccgttctttccgttcggctcttacccaggaatctcctgttctggaggtgtccatgaatatggatgattacgcagagaatgtagagaatttcgagtggtcaatagaagtgatcatggctccggccaacacatgcggcatcatggaaatgatgcggaaaaaggagctttccaacggtaaagagaagcagatttgatggaaagctgccggagcggtctggcggatacgcggtttcgtattcctgccgcaaacccgttcccggcatggaaaggggcaagaactgttttccgggttttcatgttttcccatgggtgaattcagccacgagatgaccgcagcggatttaaatgtttttcagcatgtccagcgtttcccggagtttgtccgcgggagcggcgcttgccagccgcgggaatttgttggacaacaggataaaatccccgtttctggtgagcatcaggcgctgcccgctgatttccaccatggagatgttggcatgggatgccaggattttgattttgtgggagtccagcaggtggcgcaccgtttccggcgcggggccgaagcggtcttcccaggcgcggagcagattgtccgcttccttaagggtccggacggcggccagatccttgtaggcggagatgcgcagggccgcgtcactaatgtattccctaggaaggaaggctcccagatagtccttgcgggattttgcggcgaactgcgtttcgctgttaatgataaagtccgttcttagagccgcatccggacggggggccgtgcgtttgccctgcatctgggcgatggattgctggagaagctggcaatacaggtcaaagcctatggcggcgatgtggccgctctgctgggttcccagcaggttgcccgcaccgcgtatttccaggtccctcatggcaattttgaagccggaacccagttccgtatactgtttgatggcggagacgcgtttgcgggcgtctcccgtggtggcggcggatctggggagcatgaggtaggcgtaggcccggtggcccgcacggcccacgcggccgcggagctggtaaaggtccgccaggccgaagcggtccgcgcggtcaatgatgatggtgttggcgttcgggatgtcgatgccggattcgatgatggtggtggccagcaggatgtccgctttcccctgcacgaaggtgcgcatgaccttttccagttcttctttaggcatttggccgtggccgatgacgatgcgggccttgggcaccagggcctggatgcgatcccggaatagttcgatggttttcacgcggttgtgcagcaggaaaatctgtcctccgcgctccagctcgcgttccatggcctttttcatgatgcgttcgtcgtaagggcacacgcttgtctggacgggctgccggttgacgggcggggtttcaatggagctcatgtcacgtgctcccatcagggcaatgtacagggtgcggggaatgggcgtggcggacagcgtcagcacgtcaattcccttgaagcgttccttgaatttttccttgtgcctgacgccgaagcgctgttcctcgtcaatgactaccaggcccagatttttcatggatacgtcatcggaaatgagccggtgcgtgcctatgacgatgtccacagctcccgttctgagcccttccagcgtggagcggatgtccgccgcgctgctgaagcggctgagcatttcaatacgtacggggtattcgctcatgcgttccttgaacgtgcggaaatgctgttccgccaatacggtggtggggaccagcacggccgcctggcggcctcccgtcacgcatttgaaggcggcgcggatggcaacttccgtttttccgaagcccacgtctccgcagatcaggcggtccatggggcgggtggattccatgtccgctttcgtctgggcgatggcgcggagctggtcctgggtttcccggaagggaaaggagctttcaaattcccacatccatttgctgtccggggggtggctgtagccttttcctgtctggcgttccgcctggacgttgaggagctgggcggcgtaatccgccacggatcgttctgcggattttttggcgcgctgccatttggagtcccccagtttgttgagttccggcgttttgcttcccaggcctatgtatcgtgaaaccaggtgagcctggctaagggggacgtgcaggatcgtgttgtcccggtagaggatgttcatttcctcgtctccggagtcaggggaggcggaaatgttgatgaatttgccgatgccgtagctggtatgcaccaccagatcaccgggattgatgtctttcagggatgcctgcgcgcgtgccttgcgcgccttgtcttcccggctggcgcggcggcgcgccgtagcggactggtacctgccgaacagttccgaggaagagaggacggccgttttcgcttccgggatgctgaaccctgccggaagttctccgcgaagaggggtgatggacagcagagcgggcgttccggcgcagatgtcccggaagcgttcttcctccccttcattggggaagaacatgctgacattccatttccggtccagccattcccggatttggcgttccgccagttcacggcgcatttcctgcatcacgaagtcccccgcctcaaagctgcccaggggattgtcatggatggcaagggagaagtcttcttcccccgccgcattttccgggggagaggtgaggatgcatacgttcccccgttccttgcagaaaggggcggtaataaccaggtcgcccggtttgatccagtcccgcagggtttccgcgccctcggcttccgtcagtatgaggttgacgtgttccgccttgcggaaggaaatctgggaatccacatcaaattcccggatggattcaatttcgtcgtcaaaaaactccaggcgcacggggtgggaggactggagaggaaagacatccaggatgccgccgcgtcgggaccattgcccgcgggaaatgacctgtggaacaccttcaaatcccgcttccccaaactgccgtatcaagtcgtccggtgcgtgcgtctcccccgttttcagggtgatcccctggttttgcatgccgtcgggggacggaacctcatcgttcaggctgccttccgttaaaatgatggtttgcccgcccgtgcggctggaagagatgcggtgaaggatattcagacgttccgcggcgagctccgggtcccccatttcctcccccagggccacctctttttccggaatgaagaggaggtggcgcactccccaggtttccagttgggctgcaagggcttcctgagcccgcaaatggggcgcgaccacccaggcccgtgcggtatccggaagggttctgatacacagggccgctacaaacggcaccccgggcagggaagtatggtcgaaaaccgcctgttcctctgtgcccagtttcgccagttcccggtgaaagggggcggtacgggctaccctgtccatcagggcggatatggaagcttcttctgccatgcgtgtctgtgaatccctgttgagggaagtgtgccgcctttccctcccgtgtcaacggtttttcagggcacaaaccgcccttcgttttccgtcgggggactgtttccacggcacgcgcggcatagttcaggaagaggaacggaagcggattttaacgccggccttgcgccatttctgttcaatttctttggccagttcttcatagctccgtccgtcaaggaggagtttctgagcttccttttcactggttccggattgaatggctttcatgtaattcttgatgcgccgggcatcgcccttgccgtccatgtggtaaaaatagtaggccatcagggcggccaggccgtagttcaggttggcgttttctcccgtgaactgggaatagggcatgttcatgtaagcttccaggccgggtgcctcaaagtcatccccaagggcccgtccccccgtattttttttgccgtattccgtcacgcgggagacaatgtgggatcggttggctccaaagttgaagcggccaccggcatagggcgtcatgcccatgtattccgcggagccttcacaaaaccagctggcctgcttggcctgcgaagacatgagctggtgcgtcagttcatggatgagtgtggaagcgtccttgtcacggtcaatgacgtatgtgcttcccatggttttgactcccagggaatcgaacggaaccagaattcttccgcgatcccctggccgcgttgtccccaggaagatgcccgccgtgccttcgcgtccgccgttttccagataggtgctgaatttttcatacaggtaggcggggaatttggcggaatcgtcatgggcaggggagttccctataggaagggttttgttggccaagtgggtggcctcaaagaggaggcccaggcgcttgatcatgccggtgcccagcttggcgtcgcagatgaagcggaaatggggtgtttcataaatatattctcccggttcctccttgatggtttccaccttgaaattgtccgggcatttgacgctcctgggccacggcaggtggtaattgtccgccgtattggtggggagtgccccacctttttcctgttccgcgatgaaatccctgtcttccagggagagctgggagaggggaatggagacggtttggccgccggaacgtttcagcacggctttctggccgtccagcctgatgaattctgcttccagttttttcccttggaggttggtccaggtgcgcccctgtgcaaggggggtaaggaaaagggcgaacagagttcccgccgccaagcagaggcgtgcgggctttttcatcaggggtaagacgggaggcatgaacataattgcgtttaatgtttgggacgcggcagcatcaggagcagcagcccgcagaacagcatcaggcatcctgccgccgccagggtggtggtcagcggaacgccctgatccttgaaccatcccccaaagaaggagatgagggcgcccacgccggcggatgtgaggttgaggaggccatagccggttgcggaataacgctcgtcgatatgggagcgtagcacaggcatgagggtggcgtccagtgatccctgcgccagcccctgcgtggcgaccagacccagcatgagcacgagcgggacggtgatgtcccagccgaagatgccgggcagcagcgccagaaccaccaatgggccggatatggtgaaggtgatgcccggcaccagggcgcgggcgcgggcgttgcgcctgtaccacatgtccgccaggatggcgcctcccagcacggcgacgtatttggccacggagctccacagggtggcggcggggcccgcttctgcggaggagagctggtatttgtcctgaagcagggtgggataccaggtgagaaggaaccagtttccggctccggcaaaggccactacggccagcagcatccacatggggcgtccgctcagcaggctggaaaggacggctccggtggaaagtttggaagagggttccttgatggcctgttcgtcattgtccacattgagcagcaccgtttttttctccggtacggacggtttttttgcctgggccgtatccgccggggctttggacggatctttcaggaacaggatgaggatgacggcgtacgccacgccgatgaggccgaacagggcgaatgtcatgcgccatcccgtccatgaagccatggtggcaccgaaaccggcgacggccatgcctacatagatgccgctcatgtgcaggcccgtagcgatggagcgcgtgctgccgcggtggtagtccgtaatcagggccagggcggcggggatgtagaatgcctcgctgatgcccattgctccgcgcgcaatgagcagggaagtgtaatcttccgcatggccggtccaccatgtgaccacggaccagacgacgagagagcagaggatcatcagtcggcggctgtaacggtccgccagaaagccgcccaccgggctgagcagggcgtaaatcagcaggaaaacggaggtgaccatgccgaactgggcttccgtctgcggaatgtcccgtacgatgggttcatgcagggcggaaaggagctggcggtcaaaatagttcagcatgaccacaaaccacaggacaatgacggctacccaggcccacaggcccggcttggtgttcgggtccgtgacggaggcaacatttttaacgccgttgcgcacggcggagacgatgatgatcgccaggacgatgatggtcagaatgagaacggcgtaatcaaccgtgctcatttcaaagtggtaacctgcggaggcggaggcgtttacgggagtccggacgcccggggccgtttccccgctgatggtcatgatttcagagcccctgacaacggcgggaaccgtggcgatgcccacgggccattccccctggcgcgtccatgtgtttccgatgacgtcatagaccaggatatcccgggactgcgccacaggcctggacgggtccggcgagttgccgcgcttgtctccgccgatcaggagaatggagttttcccgcaccggggcgggacccgcggcggcggctacgggcattcccggtccggcaagctgctgcctgccggaggagccccatttggaagggtccttggacgtcatgtcatagccgatcatgtcggaaagatacgtcctggaggtttctccggagttatccctggacagggaacagccgcctatgatgaacagggtgctgtcgcagacggcagcggtggagagaatgcgcccctctccgggaaaagggggaagggaaacccatttcattttatccgcgtccggcgtggtgtccagcatgtagatggtattgagtgcggtttccggctgctcccggtctctgccgccgatgacgaacaatttgttcccgtgggcggcgcaggaggcttccgttacggggacggaaaggggaggaagcttttctacggagccgtccgttttaatcagcagggcatctttcaggatgccctgagcattgtggcctccggccacagccagccccttgcccacgctggcaaaggcggcgtaacccagcgggacgggcaatgttcccgccttgctccactggccgttgcgaagcttgaaaatatcctggtagtaggttttggggccgcgttcctccggagttgaggcgcccggcgcagcctgggggaagttggtgccccctgcggcgatgacggactggctgccgtcgtcttccgtgacggttccggcaaccatgccggcgcggcctgccgggtccggaaggtcgggaacagttccggacgtccggacatccacggaaaaggaggcgtcagcagccggagccgcgatgagaagcagggctgccagagcagagccgcaagccttggaaattcgggtaagggtgcgtgtcatgtgcatatgttgagaggtttaattggattccggtcaaatcaggggagggagatgctccatacctcaggagagcgcctgccgggtttgagctctccgttcacggccgcgaaacggccctgccacgcgcaacacggaaggacagccctgggcgcggcgatggggcctgcgtcgtgccatgtcatgtctgccgtgtccaggcacagggattggttattgaagccgggattagtttggggagtgtatttttttccggagccgtcatcccccccaagcaggtaaatgacgccgtttccggaaaccggggccggggtgggggctgcggcgatggcgtaaggcatgtccggcaggcgcgtccatccgtgttccggagtatagctccaggcttccttcagcagttcccggacctgttggccgtcctgttcccgcaggccgatgccgccgagcacgtacagggctccgtctgttgcggccatctgatgcaggaagcggccgcggcccggcagcggggcctgttccagccatccctgttccgtccggcgtgtgtccagcatgaagacccggttggtgcagtcctgctcgccggggcgttcgcaccctcctgtaagatagactttcccgtccaggacggcagccgccgtatatgccagggagatggggagggaagggaaaggatgcgtggtgacagttccctccgcgaggttcagcaggtaaacgtctttccggtgcccttccttgccgcagccgccgatgcacagcaggccttccctgatgccggcggaggcgccgtatgcataaggcacgggcaatgtgccggcctctttccattcgttttcccccggagagagcgtaaagatacggtccgtccacgttttggcccccccctcaagcatgggcttttccgggaaattggtacctcctgcacaaatcattatttctccgcaggtccctgcgtacatgccggcgaagccttccggatcgggaagggcgggtaaaggtgtccaggatgaagaatagcggctcataatacgtgtaaatgactcgccatatactagctaaaaaccggcggctgcgccagtattaacctctggtcctatttttttgaataaattcctttccttgcgcctcttaccaacgtagaagaggttaatcatatgaaaacaggaacccgtttgttgattttatgcctcctggctcctgccgccctggcggaaaatatgtccctgcggtccggcagggtgctgaaagacgccgttgtagtgtcttccggagatgattttgtcaatatccagtacacggacggggtggccaaggtttcctataaagatttgacggatgcccagcaaagggattacaggatgacgccggatgaagtgaaggccaggctggaccagcgaaggatggaggaagcggcgcgcagaaagaaggcggaagaagccaggaaggcggccgatgaagaagccaggaagatccgggagtccctgtctgaggcggagcggcatccccgctacctggaaggggcggatatttcccgcatgtttttgctgatgggggaacttaccaaggtggaggcggaggttatggctctgcagtggaatgccctggaagcggaccgtgtgggtttgccggaagacgcccgcgttttccgcgcaagggcggcagcctatcaggagcagataagcgccatccgtaaaaaaagggaaaccgcggaacagtattggcaggatttggagaagaaatacctggccttgaaagacggtactcagaagaagattgcggatttgaataagcaggtttcccaattgcagggggaagtgagggaggtggccagccagccgagaacggaacgcatcattgttcctccgattatcaggacgtggaattacccgccgccgcctgtcattatccggccccagccgccccctccccgtcccgtgcctccgcgtccgatgcctttgcccgtaaagacgagtttgtacagaagttaaagatgctccggagcattcccttttctgtccatgggcctgtgccgtttactggaaaaagggactgccggaaaggaatacgggaaacaggccgcccgtgcggctgccgccaaggcctgccggaacattcctttgccgcggagggaaagcatcagattccgggcagggggaacagtttcatgcggcccccctggaaggaggccagatgcctgaatcctgcctgccgggccagttccccggcccgcttgaaatcccgccctacatcctccggcctgtgggcgtctgaactgatggtgaggggaattcccgcctccgccgccattttcaggaattgcccgtccggatattgttccccgcacttgttgtgccaaccggctgtgttaagttccaggcaggctccggtttcccgcatggcttccagcgacggttcataataacggcgcaggtctccagaagggcggaagccgaattttttaatcaggtccgcgtgccccatgatgtggaacattccggaggcggccatgttccggaagcgttcccaatactgttcccatgcgtcctccacatccgtccggtgccagaaatccatcctgtggggattgtcgaattcctccttttccccaagataatggacggaaccgatcaggtaatcccatgcgtgcaggccctgcaggtgctctatccatggttcgatgccgggaaaccagtcgcattccagagcggaacggaccgtcagtccgtgcagcgcggcgcattcacgggcttccgtgagccagtccaggtaggccggcatgtccgcctgcttcatgcgccagtcgtcaaaaggttccccaggcatcggggcatggtctgaaatgccgtattcccggagtccggctcggacggctgcctgcacatattcctgcggagtgccggaggcgtgcaggcacaggggggtatgggtatggtaatcgcagtacatggaggggaatgcccatgctagcatggcggagcggacggttcaacccggagggatgtctttgttcattatttgccgtctttgactttatgagttgattttatggacaggattttttagagttgcgttaaataggacacgtgacatatgagtgactggcaaggcttttccccgctgaatgattttactgggccgctcctggataacctgaagcgccaccccaagcgcattgtttttccggaaggggaggatgtccgcgtgctgcgcgtgtcccagcgctttgtggaagagcaggccggcgcgcctatcctgctggggaggagggaagtcatcacgagaatggcggaaatgaacggaatttccctgaaattcgtccgtatcattgaaccggaaaaaagctcggatcttcagatgttctgcgaccgttatgaacgggcggagcagatgttcggcaacgggttgcctatgaatacccgtgaaattgtttccgaaccggttcattttgccgccatgatggtgctctacggccaggcggacgccattgtggccgggaacatgaaaagggtggcttccgttttccgcgcagtaaacaagtacaggcaggatcccgttcccaccaagcccctgtttgccatttccattgtgctcgttcccgaattttccaagaaattcggcggccgcggcgtctattttctggcggataccggggtaaaccctgaacccacggtggaaaatatggcctattttgccgtagagacggccaaaatggcccgccacatgctgggtaaaagcgttcgcgtcgccatgctgagcgcgtccacttcgggctccgttccggaactggctgcggaccgcaccagggccgctgcggcgctggcgaagagcatggtgcagaaggattgcctgaacaatgaaatctccatagagggggaaatccagattgatgccgctctgtcgtcagattcctacagcgtgcgcgtgcaccgcaactccatgcttcagccaagtgaggtttgggtcttcccgactctggatgctgcggatatctccaaaaaactgttgtgcatgatgccgtccgtatacaactatggccttattctgggcggtctgctcttcccgattgcccagctgccgcggctgacggatgaagacaggatgttcggtactgcgctggtggtggggaatgaagccattaaattccacctgttgtatccgcagggggttgctccgctttattgaccgggcgcggcgtgtccgtgaccagcaggcgcttttccttgcgtacggccagttttccgccgggcagggaagttcgggaagggccgtccgtattcaggatgtccattacccggagtacggcgtcttccgtcaggtccggaatatgttgccggcgcaggtaatcatgcacggcgcattgtctcagctccgcaggaagcaggttgattttcggcaagaacaggcgcccctggggatctgtcaggttcatggagtccagcgcctgggaaagcgccgtgcggatttgattttccaggcggcaggcacgtgaaaagggaaggctggtgtccctttggaacagcgcattcaatttgggaataatctcatggcgcagggcgttcctggtatattcggcagactggttgctggaatcttccctccatggaatatggcgatgctccagataggaggtgatatcctcccgggaaaaatccagcatggggcgtacgacggtcaatccgttggcccaggtggagacggggaacatgccgtgaatgccggaggcaccgcggcagaggtgaagaagggccgtttcctgctggtcgttccggtggtgggccagagccacgagagcccccgggtaaccggcggcccatttcagaaacgaggcctgcctggcttccctggccgcttcttcaatggctattccgcgggtatgggccatactgcggacattgacgcgttcccggacacagggaatacccagggaggcggcgtaacggagcacaaacatttcctcttcctccgcttccggacgcagctggtgatttacatggcatgcaaccagattgcatcccggcatgccggacagcagggaaagcaaagccatggagtccctccccccgctgattccggcaaggacggggcggccggagcggaggagttccgcggactggctgtcaaaatggtccggtgtcaacatggtgctgctgcgagtgaatcaggaaaaagagatcaaaggaagcctgcaaataaaaaccccgttttccgggaaggaaacggggttggaaaattgctgaaggcagttcttacttgttgagcttgggcttgcctccgctgcggcggacggtgccgaagcgcttctggaatttgtcgatgcggccttccgtgtccacaaactggttcttgccggtgaagaacgggtgggaatcagaggtgataccgcaggaaaccacgaaatgttcaaccccgtcaataacttccgtcttgggagaacgaacagtggaacgggtgatgaagcggcgtccggtggtgatgtcaacaaaaacgaccggattatactgggggtgaatatctttcttcatggtgatgtattgcgtttccgacgcaaggggaacgcaagtataaatatgtttcattgcatgtcaagcatccccgcgtaaaaataaggaagtttgtggatgacggttcgggagcttgcggaaggaacggttgtggagatgatatgacggaaaaatggagcaggtgttgaagaggcccccctggtgggcgtggttttccctgatgggattggaaatcccttctgccgccattgcctgggcttttgccgtcagccagtcccatctggtggtagtttcctccccctggctgtatcaattcctgtttgtggctgtctggtgcgtcaatatgctggaccgggtgctgaaaatattccggggcggttccgctgtctacacggatgaatgcctgctttttgccaaaaagcattgtttcgttatctccctgctcattatggtggcggccgtgacggggctttggatcatgtttttccaattgggtgtggttatttttcaatttgcctttctgcctggcgtctgcagtctgctctttctctatttctcttccaaccctcatcagaaagggagcctgtcttccggattcgtcatgggggcgttttttgccgccgtttccttcgctacgggtgccggaataccggcctacttttacgggacggtaggcggcggctggggaggccagctttccgaacccacctggtatctggtagcgctggtcatcctctgcatgttcagccgcaaacggtggagtgaagaagaggatgaggacgggcaggattccgccgaccgcgacatggtatccctggtatggatgggggtgatagtcatttacgtcgtattctgtctggccgccgccgccagggaatataccggggatgcgtggatttattatgggctggcaatggcgggggcattcatgtttgtgctggacaggctgaagatgaacatgcctcccctccttctgcacacgctatcctgggcggcactgattttcccattgctgttgagcggtattctggcgcaggcttcctcctgattggctgggcggattcctgctatggagcgcggcaaaatacagggaagttgaaaaaataatattttgtggttgcaatattgggaagaggatgataaattctgccccgcaagcacgttctgcgtgcaggcaagtggctcggtagctcagtcggtagagcaggggattgaaaatccccgtgtcggcggttcgatcccgtcccgagccaccattttttctcccaatttctaatccctcctttttatacgggaagtagctcagcctggtggagcgcctgctttgggagcaggatgtcgcaggttcgaatcctgtcttcccgaccattttaaagcctgtggatcaaatgatttacgggttttgttttttgagctgttccctggtggttgtccgtaaaataggtggagtggaagcggggcatgcctggaaagatgaaaaacacccctgttgcggcggggcggccgaacctgcagccagttaaaaaagccggaaatcttttgtgtccgaagcaacgcggacagaaaagcgatgcaaagttcttgtaacacccgtgtgctgacgaaagcctggtcccggcggcccggattttttctgacggcggggcggatgaataagatttgctaatgtgccaggctgaaaaacggtgtaaagaaaaccgccgcggggtgggaagtgcggcagaatggagaaaataatagatgatagaaatagttttatttcttttttagtatataatattcggccaggacgccctgattgactgtgccttctttgtctgacagcattactttgcttccatcgagtattttataataagatttttcattggaagaggattgggccagttccatcaggcggccattgatgaaatgataagagccttttgattcgaaaatagcgtctttttctcctatgtattcgcttctcaacacataagtgttatcgttgtttaatgttaacgccgtcctgattccttcacaatcggcagcaggaagaattccttcataagtgccgtaaaaatttaaattctccaactgtttttctgtttttgtttcgccgctctcaattcgagaatgatgattttggggggaatcacagccggttatggcaactaaacatgcggtccataaaaaatttattttcatgacaagtttttttcagctggtggtttgtgacgtgcgatgcttgatccaatggggcagggaagggagtacgttcgtttcctgtttttccggttttgccgtaatataatgaaagtctatggaaggggcaagatattttcttttcatggagcccgcgagtattgatgaatgccggattaagtaatttatcccgtttttattcaactttgccggaagaagagttttctaaccgggatggagtgttttgcagtccgttttgcgaagatgttgttttttttgaggggagccgagtgtctggggaagccccctctttgcagatattgccgagaaggctggattttttgcttgagattaggaagaaggcttgcagagtggcttgatgaggcccgtccgacaaaagacattttccgtttcctggctggcggggttgaggtggtcgtttggcgggtatgtaacgggaacacttctggcggcgggtgcgggggcgctggattttcccttgctggcgcaggtgatgcttttggccgcggcggtttgttttgccgcctctcttgtttgtgcgggagcgtgtttccggggcagcaagattgcccggtggtacttgcttcttgtcctcgtgatgattatggttgcggttctgtttgggaatggaggcggttaattagtcatttgtatatcttttgattgaccgcgtgcgcgcgtatgtatactttccggtcatgctccttcgattcttatcgagtctcttttttgcgtccggcattgttttgaccgctcaggcgaatacccagccttatccggattccgattcttctgacggatacgataccggtttttatgcagaggcttattccggcggctacgacagcgctccggctccggcgggggagtccgcctccaggcctgttttccccacgcagtcctattttgaattgcttggccccatggattccagaaacgggcgcggaagcttggatatccagaattggatgacggatttgaatttgtgcaggatgtccagcggttcctggaatttttcttctacggcggccttgcgcctgagctggtttaatggaaaaggagcggatgagatggatgtggaccggctgtacacgatttggctgaatgtgaacgcctcctatgccatcacggggaagacgcgcctggttttcggtgtgacgccccagatttccacggatttcgatacatggacgagccataatattttcttgggaggccatgttcttctggcaggccccttgaacgaccggttcagctatggaatcggcatcggctgttatccgcagcttggggattatcctttccttccccttatccagtttaaatgggaagcttcccgcaattggacgcttcagctggaaggggcccgcctttcctatatcaacaaggtgagcgatgggttgaagtggggacccttcgtttccgtggtgtccggcacatggacgattcaccatgaccgccgcgtccgccagtttgcgtggatttccggcgtcgccggcataggcgccgatgtggggttgggtcactggggcagcgtgcgtcccaggctggtggcggatgtcggtttttccttcgggaattccggcactatcaggaccagcaacggaagccatgatttggaaaagtaccactatgaccccggtttttatttgcgtgcggggctgctatttgagttttgaccggccaacaggattagcgaatacatgacaaaggcctccggtgcgttgaatgtgccggaggccttttacatatggggacgtttgaagccgggacggttcccggaggcggtcaggcttcttcaacggagggtctgcccacggagtggtattcaaatcctacggcccggaggtttgccggggagaggatgtttcttccgtcaaagatgatgcggttgcgcatgacgccggcgagtttctgcagatccgcattcgcatattcgctccattccgtggcgatgaccagaacttccgcatcccgggcgcattcgtacatgtcttccaccagtttgacccccatggggttcagaatgggggccgccgtgtgcatggctttggggtccgtagcggtgacaatggctccttccccgcagagtttttcacatagtttcagggcgatggattcccggacgtcgtccgtgttctgtttgaaggcaaggccccaaacggctatctttttgtccttgaggacccacaggcggtcccgaattctgtccaggaagtggatatgctgggtgtcattgatgtgttccacttcctccaacagggtgaagggaatgcccagcgtacggctgatgttgatgaaggctttgacgtctttcgggaagcaggagccgccgtagcccagccccgcgttgagaaagtggcgtgagatgcgtttgtccatgccgatgccttccgccaccagttccacgtctgcgcccgttttttcacagaccttggcgacagcgttaatgtaggaaattttcagagccaggaaggagttggctgcgtgcttgatgagttccgcggagttgacgtccgtttccagaataggggcatgaatgggctggtaaacgcgcttgatgacgttcatggcctgttccgagttggctccaatgacaatgcggtcggggtgcagcaggtcgtccacggcgcatccttccctcaggaattctggattggagacaatgtcgaactgaacattcggccccgcatagtgcttgatggtctggctgactttttccccggttttgacgggtacggtggatttgtccacaatgaccttgtatcccatttctggttggagcgcctgggcgatttccctggccactttttcaatgtaggtcaggtccacggaaccatccgtattgggcggcgtgggcacggcgatgaagatgacttcgctttccgcgatggaagcggcgatggaaggggaaaattccagccgccccacggctacgttttttttcacgagctcttccagcttgggctcgtaaatggggatggccccggattgaagagtacgtattttttccgtattattatccacgcaaatgacgtgatggcccatttcggcaaaacaggtgcctgtggtcagccccacgtaaccactgccgataattgttaaattcatagtgttagcgtaaatattggtaaaaacttaactgtatggaaaagtaagagcagtcaacccctgagcattatgggatagggaattttttctgtcaaaataaaaagttcctgattgagcgcctcctttccttgtggtataaccgtgaccagacaggaaaatatctgtttattttaatttgaacgttatgaaaacacctatcaccgttaccgttacaggagccgccggccaaattgcctattcccttctgttccgtattgcctccggcagcatgctggggccggatcagccgatcaacctgcgcctgctggaaattcccccggccatgaatgctctggaaggggtggtgatggagttgcgtgacgccgcgttcccgctggttaatgaaattgtcccgaccagcgatcctgatgaagcgttcgccggcgccaactggtgcctgctggtaggctccgttccccgcaaggccggtatggaacgcaaggacctgctggatatcaacggcaaggtgttcatcggccaggggcaggccattgcccgcagcgccgccaaggatgtgcgtgtgctggtggtcggcaacccctgcaatacgaatgcccttattgccatgcacaatgcgagcggcgttccctccgaccgcttttttgccatgacccgcctggatgaaaaccgtgccaagagccagcttgcggaaaaggccggcgtccatgtgacggaagtgaccaacatggccatctggggcaatcattcctccacccagtaccctgatttcaccaacgccaggattggcggaaagcctgtgacggaagtcatcaaggatacggaatggcttaagggcgatttcattaccaccgtgcagcagcgcggcgccgccatcatcaaggcacgcggcgcttcttccgccgcttccgccgcttccgcagccgtggataccgtccgcagcctggctacccagactccggaaggcgactggtattccgtggccgtttgctccgacggttcctacggcattgaaaaaggtcttatctgctccttcccggtccgcaccaccaaggatggcggctgggaaatcgtgcaggggctgccgattgatgcgttctcccgtgaaaaaattgacgctaccgttaatgaactgaaggaagaacgtgacgctgtttcctctttgttgaagcattaatgttgatttgctcttgcgccgggtttcccgttttcgggaagcccggttttttatgtcctgaagattccataaacctcattttctgcgggacagaagttttcttccgtgttaaaaaaaacgatggatgcagcatccgctagtttatggatcaggaccgcatattatacaggggagaggcttttacgctgaccggaaattccttgcgccaggatgccgcgcattgggcggaggtacagccggacggtcaggtgaaaaccatgaaaaacggccgctattccgagtggcgcatctttccggaagccgggaacgccccgcattaccggggaaattttgaagtgcttaatcaggcttacggcctggcgttgcatgaggctggagccctgcttaatgaagaagggatgttccggacgggagccaactggcctactgtgtggacccgggatatttcctattccacccatctgggattggggttgtggaatgtccgtgcctgtatgaacagtctgaatgcacgggtccggaacggggaggtggagcaggataccggcacgggcggttcctggcccatttcttccgaccgtgtggtgtgggggatggctgcgtgggaagtttactgcctgacgggggatgccgactggctgtccctttcctgccgagtgatggaaaagacatgcatgagggatgaacaggtgcttgcggccacgggcggcttgatgaagggggaatcgtccgtgctggactggagggagcagagctaccctgcgtggatgacttctgccgatattggggattcttgcagcctgtccaccatgctcctgcatgcggaggcccgcaagattctggcgcggatgttccgggagctggggctggaggagaaggcccgggagtgggaggagaagagcgtttccctggccgcggttattgagcgttttttcaggattccggaacatgtcctgtacgggcagtacctgtacggacgcgggtatcccgtactgtcggagaaggtggattccctgggcaatctgctttgcgtccttctggggcaggctggcggttcccatgctgccgggatggttgcctcccttcctcatggcgtttatggcattccctgcatccatccccagatgcctgatagcgtgcccgcctaccataaccgcgccatgtggcctttcctggagggctattatgcgcaggccgcggcggcggtggagaatgaatctgccctggcgctggcggtcgcctgcatggtccgtgccgccctgttgtgcggcacgaacaaggaaaatgtccttctggaaacggggctggatgaggggctgctgctcagttcggatagccagctctggagtattgccggcatgctgggctgtttttacaagggattgttcggcatccgtctgtctccggattctctggaattccgtccttgcgttccaaagtcttttgaaggcgttcatgagttgtccgggctggaataccgcggcatgacggtagatgtgtttctgcagggctgcgggcaccggatagcgcggtgcctggtcaacgggcaggaggcccctcccgtccttttgccgggcatgaaggggcgcgtttttgtgaaattggagctggacggcggagaagaggatgaaggggcggtgaatttaacccgcatgggcagcagcctggagtctcctgcgtggaaggcggcgcgccatggtattgcatgggagtctgtggaaggagccgattattaccgtgtttaccggaatggcatccctgtgtctcaaacggagtactgccattatatccccgcacccggccggggggacgtgtctttccaggtgatggcagtcgctctggatgggagggagtcttatcttaatgaacccaatgattatccttctgcggattcccgcatggagacgcgcccctgcggcttgagcggggatgaagtctggttttcccgcgtcacggaatccccggacgctctttgttacaatgtcaatatagataagcccggagtgtaccgggtggacgcctttttcgctaacggcacttatgatgtttcagacgggaatacctgcgccctgcgcagtctgtacctgaacggcaggcgcgcaggcacgctggctttcccccatacgtcccgttccggaaactgggagtattttatttattcaacggcagtggaaacggtgatgacgcccggtccctgccgtgtggaagtggtgtatgattccttttccgaaaatatgaatcgtctggtgaatgatatggtgataaaacaccttcggtttacccgtatatcctgatattagttcatgaatgttatgtcgaaacgtttttttgccttgttgctggtcctggggtccgggatatggagtgttcctgccatggggatggatgaggagtcagcttccagggcatctgttcctgcctcctcggacagggagggagcggagtttacccgtctgcccgtcagctggacggttaatcccagggatgccgccaatgcccgtgccgcctggaaaacgctgagcgcctatcatcggggcaaaccgaagtcttccagaaaattgcatgtggtttacgtaacgttcaaggacaggcctgcccttgaaggataccgggaacggtatgatcatattctgaagaatattcaggcatattatgcggaccagatgcaggccaacggtttccctccgctcacattccagctggatttggatgaacggggcaagctggttattcatgatgcctatgtggataaacccatgagcgagatgagcgtgcagagctccggccccgtctcccgggaagccgccaggaaggtgctggcttccaaggggattgatattgagaaggaacatgtgctggtcgtttgccagcttccggacggcgtgggtccttattacggcggcggcttcagccaccagggcacggggtggacctgtgaccaggaagggctggatcccgccagctttctggatacggaaatgatgcagggcggccgtttcaaggtgaccaggggaaagaacgccaccatttacataggcggtacggcccatgaattggggcattccttcggccttccccacacgggcgacggatggaattaccccgacgccggagcttccctgatgggccatggcaattccacctacggcgacgagctgcgccatgaagggaagggtgcctatttggcgccgacggatgctttgaaactggccagtgttcccctgttcaacggggtggagacggaacttcccgcagacgcctccttcgggcgtatgctcggcaagtatgtcccggggtcttttgaacggctggaggccattcccgttaaagacggattgcggctgaaagggagggttcatctgacgcgccccgcgtatggcattgttgcccatttggatccgcccggaggttcggattatgattccaatgccgtgggcgcttctctggatgaaaagggagagtttgatctcaccatctgcaggccgggatataagggtggttttatagaaatgcgggtggccgtattgaattgcgacagcacgcgcagcatgattactctgcccgtgtggatggatgcccggggagccaaggccccttctctggcccagatcgtttatttcggggatgttcagaatctgtggatacggggccgcacggaagaagcccggaaggcgctggcggaagtggaacgcaggcatggttcccgttctgaagtgaaagaatggctccctgtctggaagcgcgctctggggcgccaggagcccgcgctggaagttgttccggcgcagattcctgcggcaaccgccagtatcagcctgaatgactgcaagccttccgtagcccaggtggggtgggccgttccgttgtgggatgtcctgttcccgtcggatttggggcccgtgcctttcttccggacaatcggaaggccggaacgtttcattctggctcatgccccggctgtttttgcctatgacctggatgggcgctggaaagagttccgcgctgatgtggggctgcccttcggctcccgcggcagcgtcaaattcagcgtgtatttggacggcaggaagcttatggaatcccctgtgctcaaggacggggactccattcccgtgaagacggcggtagagggcggcaggaagctggaaatccgcgtggatgacgccggagacggcaatgccgccgattggggcattatagccaacggcatgctgacccggtaaattttctgcccccactggcggagaaatgtgacattaggcttgtcttttgccctttctcatagtgttctgtgggctagccatgattgggacgattgcaaagctatggggtgcggcggcgctggttgccggggcttccctgtttgcagaaacggctgcggagcagccgcccgtcccttcctctgaaaccgggcaggaaaatgccggagggaaaatggcgggcaatctgctttccggcactctcatgccgcagattccctccaatatttccattaccaatgacggcgccatcagggtggaggaatccaggaaggttatttttgaaggaccgcatgtccacatggtgacggataccggggtggaggtatttgcggattatgcccaggcggatatggaccagggcaaggtgtttctgaaagggaacctggccatttaccagagtgacggcaggacaaggaccaacagcctggtacgcgccgacagcgcggagtttgactgggagaacgaagtgcttcttacggatgctatccgtgcgaagatggagggattgattctgcgcagcggaaagtttgaatcccggaaggatgccgccggcaacacttacctggaagcccgcaatgcctccgtcacggcggaagacatcagcgaacctctcacctggatttccgccgacaggatacgagtgtatccggaagacaggttttctttcaagaacctgaccctttattacggtggcgttcccttcttttatttcccctacctcagccattcccttaatccggaagttggctatcttcccatccccggcatgcgctccatctgggggccttacctcctgaatgaatacgggttcctgatggggaaaaaatggtcggacaacggcatgccttccgcggattacctgggaaccctgcatgcagattaccgcacccggcgcggtttcgcctacggattggacatccgcgacgtgctgctggaaaaggattgtccggacatgacggggctgtccttttacaaaacccatgacaagggggtgaaaatcaacgccggtgatgatgagtaccgtgagcatctggacccggaccggtggaggttcgcgctccagcagatgtggagccacagggtgaatctccgcacggactggcggttgaaggccaacatcaacatgttgagcgacgagtacatgctccgcgatttttatccggaaatttatcagcgcaattcttctccggacaacacggtgcttctttcccgtacggacgatacgaatgatttttcactgttgcagcgttttgtccccaataatttctacatagcggaccagcggacggagttcagttatgagcgtatcaagtcccccgtattccgttcccccgtcatgtatgaaagccgcaccagcttcgctttcctcaagcagtacgttcctccgttcatgcggacggaaatccggaacatgctggacgggatggaccccggaacttcttcctatgattactgggcccgaatgctgatgacggacagctacagcaggttccactccttccatgaggtttccgtttccaagaaaatcatgggattcctgaacctgacccccaaagtgggcggaggctatacgggatattacggcgtggaggactacaaaccgctcaaccagggaattttttacgccggaacggatgccgatttcaaattctcccgccgttattcttccgtatatagtgattcctttgggctgaacggcatgaaccatattgttcagccccattttacgctggcgtatgtcaaaaccaaccgcctgagcgagctttatccccagattgacggcgatacccccacgaccaatcccccatccttgagcataggcagatacacggagattgattccctgtccacggggcttgtcttccggtatggattgcgcaacatgctgatgaccagccgggacgctaattcccaccgctggttttcctgggatgtgttcatggatgcctatctgcatgatcccgtcaaccagcgggatttttccaaccttttttcattcatgcgctggaatcccgttccctggatggaataccggtcggaaatgcaggctcccgttttgggtaaggacaagatttccggctgccgtgaatacaacaactccctgcgtttcatgccatggcgttccacggagctcgtcgtggggcaccgttatttgaaccagcattcccttctggaggacagcagccagctggatctgcgtattttgcagcgcttttcggaagcctgggctttcagcggcaaatggcgtttttccctgttggacggcaagctggacattcaggaatacaatgtgtaccacaatatgggatcctggtatttgggcgtgggcgctttcgttcgcaagaacgggaacaaaaacgaattcgggctgggcatcagctttaccatccagcagaccggagattatatgccggtcaaattcctttgatgtccggaaaggacacggttttttgcgaggtttttcccggaagctttttcctttttcagaggattcgcgttttgagaatgggttctgcccggtgcggggtgttgctccggagagggaaagatatgtagctggtcggcaagaggcggaaagccatgcggttggaagggtggggagcggcctgtttccagcgtgccggacaggaagaagaggaaggagccgctgccgcgcttgtgccggaaccttggcttgcattccggcagggaaacggggaaaatgccaaggcatggagcaagctgcggcggaaaaccgtccggcttcctgcacgaataatcataaatgaatatgaacgctcaggaattgatcgagacgctggaatggcgttacgccaccaaggtattcaatccggaccgccgcattccggcggaggactgggaagcccttctggaatccctgcatttgagcccttcctccctggggcttcagatgtggaagttccttgatgtccgggatcccgccgtgcgttcccggcttagggaagtttcatggggacagccccaggttacggacgcttcccatctggtggttttctgtgcccgcagggatttcaagccggaagacgtgcagcgctatctggaacgtattgtggaagtgcgcggtgttgccatggactccctggaccagtaccgcgcccgcatttttgaactggtgggttccaagtctccggaagtgctgaaagcctggctggaacggcaggtgtacatcgccctcgggttcatgatgagctgcgccgcggatctccgcgtggacacctgcgcgctggaagggatggatccggccgcctatgaccgcattcttcatctggaaaattccccttattacacgctttgcgccctggctctgggttaccggaatgaagaggcggataagtacgcccgtctggcgaaagtacgttttgaccgggatgaagtcattccggtcatctgacggagtttcttactaatccccggtttcaagcagtagccgcatgtcttccggcaggggggcttccgcggtgaaggtttcttcatcaaacggaaattccagccggcaggcatgcagcgcgtggcgcggcagaaccagccgctcctccagttcccggctccatccgtgctggatgtattccagatagcaatgttcggacgggccgtaaattttgtcacccaggatgggatgtcccaggtgcgccagatgcacgcgtatctggtgcatgcgtcccgtttccggaatgcaccggaccagcgccagggggccccggcgtgtattccatgtccgttctttccggaaaacggtagtgcatgcttttccggctgggtgcacggcctgtttgacccatatgcggctttccgcgacttccccctgtcttaaaatgggggcggtgcatgctgtttccgtccattcaggccattcctgcacgattgccagatattccttgtgtatcaggcgccgcagcatggctcttcccagctctctggccgcccttttgtgtttggcaaccagcgtcagaccgctggtttccctgtccagtctgttgaccagggagagggcggctccgttggctatttcatagcttagcagggattccacgccttccaggaggcagggttcctttttcccgttggacgggtggacgatgaggggggctcccttgtccaccacaatccagtccccggattccgccgccacctcaaagtgcggaaaacaggcaattggtgcttcggaaatgggaatccacatggcggatgggaggtttacagcgcatccggacggataggcgcccattcccccggtttcaggttcaggctgtccagatgcagggagccgatggaaacacggcacagagataagacgggagcgcctacggcagccagcatgcggcgaacctggtggtattttccttccgtaagcgtcagcagggcgcgtcgcggttcccggatttccagaagggcgggggcgcaggggcgggtttccccgttcagcgtgagggttccggaggcgaacaactccacggcttctgtcggaatgccctcctccgtgacggcttcgtaaactttggcgacgtgatggcggggggaggtcatgcggtggatgaattttccgtcgtccgtgaggagaagcaggccggaagtttctttgtccagccgtcctacggaagaaaccgcagggttcctgtgccgccactggaagggcagcaggtcgtaaatcaaatccccctccccgtcgtcatggctgcaggtgtacccttcaggtttgtaaagggcggcgtacaggccgtccgggaattccacaggttctccgtccagcaggatgccttccgcctgcaccttgtccgtgggggaggagcatggttttcccttgaatgtaatggagtggcgtttgatccaacccggcgcttccctcctggaacaatatccgtagcgggataaaagggcatccagtctcatgcggcatattttttcctaacgggaacaaaaaacaaggttgaagtatgcctccccggctgatagcattaaactattacatgcggggccgccctggtggggcgctgccgttgttcaccatttacgcttatatagttccatgattgaaacgattacagaagaacagttgactccccagcaggccgaattttgggtgcgcgcccgccaggcggtggacatgaacaattatccctatgccgtcagcctgctcaaggccctggtaaagcagctccccggttttctggaaggccgcaaggcgttgcgcgcctgtgaaatcaaattgaatccggaggccaagagaggggggctgttcagcggcatgaaaatcagcaccagcaagctcacttcttccaaaaaggacgcggctacccagctttccgctctggaagacgaattggaaaatgatccttacagcattccggtaaacgaggccctgtacacggctgccatggaagtaaatttcccggatctggccgcttttgctctggagaccgttcgccaggggcatcccggcaacaagaaaatgctccacatgctggcctcccattacgtttcccgggatatgccggcccaggctgcggaagtgtaccatgaccttgtgaagctggatcccacggacagtgtggccgtaaagagcgaaaaggactgcatggcgcgcgccacgatgcagcagcagaagtgggaggaggctaaaagcttccgggacgtgatgaagaactcgtcggaaacgaacaccctggacaagagcgacaagaaagggctcacccgtgcggaactggaagagcgcctggggcttctctccgcccgttacgcccagaaccagcaggatctggccgtcgtgcgcgacattgccggtgtttatgaacaaatggaagattgggccaatgcctattccttctataattacgcgttcagcctcagcaacaatgatatttccctggaaaacaaggcctcggaaatgaatgagcgatgccgcaaggcccaggtggaggaaatccgccgccgcgctgccgcggagccggataataaggaacttcaggaacagcttgcccagttcagcaaggaagctgcggagcagcaggtggccttgtgccgccagcgtgtggaaaacaaccccacggacccgcaaacccgttttgagctgggccaggccctcttcgactgcggcaattacacggaagccattccggaactccagcgcgcccgcaacaacccccatatccgcatccgcgccatgctgttgctcggcaagtgctatgacgccaagaacatgcatgatatggccctgcgccagctggaggaagccaataaggaattgatagaaatgaatgacaccaagaaggaaatcctttacatgatcggcttgctttatgaaaagcagggcaagaagggggaatccctggctgcattccagcagatttacgacgccgagtacggctaccgcgacgtagccaggcgcgtggaatcctcttacggcaattagggggttcccgttttgcgcccgtaatgggacgccgtgctcaaagcctttgccggaaacggcaaaggctttgctgtaggaaggttatttttatttctgcggacgggaaccgtaacagctttcatcccggcgggcaacggagaggggcgggcgcccttgtgttttttcttgtccgttccggaaggaactgaaagaatgaagacggaacgagctgatgcaggcattgcttacgattgacgttcaaggtgattattttgcggaatgcactgcatgccgagaatcctgtgagtatgttggcagctggttaagtatggatatcaccaacgaatacgaaaggatgccggatattggctgcatgggaaagattgggggtctttcttatgaaatgccagggagggaagtcttatgattcttttgattggcggcagcacgcatacagggaaaacactcgcggcgcagcgggtgcttgaaaaatattcctatccctatttatccattgaccatttaaagatggggttgatacgcagcgggatatgccctttctcccctgaaagccccgatgaagagctgactcccttcctctggggcattatcaaagaaatagtaaagaccgcgattgaaaatggccaaaatttagtggtggaaggttgctatattccctttgactggaagaaggattttacgcaggcctgccgggaacggatacggtatgtatgccttattttttcagaaaattatattcaaaggcattatcatgatatcctgaaccatgagaatgcgattgaacggcgcgtagagagttctcccgttacgcgggaagagttgctgcgtgaaaacaggggcaatcttgaaaaatgcaggttctatggctgtgactatctgttgattgacgagtcttataacgtggagatcatgttgtagagaacagaggctttccattgtccggggaaggaaagagaaggttatgccaaattgctttgtttataggcgcaggcggtaagagagaggttcttccacccttcccctgtattttttccagaactgctcgtgtcagagtaccttggaaaaaaactcctgcagcctgggattggcagggcggtcgataacgcggtccggaggcccttcttccacaattttccctttatccatgaacaggacgcgggaagcaacctcccgcgcgaaccctatttcatgggtaaccactaccatcgtcagtcctacctgcgccagctccttcatcagggagagcacttctcccaccatttccggatccagggctgatgtcggctcgtcaaacaggatgacatccggattcatgaccagggcgcgcacgatggcgatgcgctgcttttggcctccggaaagctggaggggataggagtgcctcttgccgtacagcccaatgcgctggagaagggcttccgcctggtctgctgcctcctttctgctggagcgtcccgttttaaccggggcgatggtgatattttccagaatggtcaggtgcgggaaaaggttgaaatgctggaaaaccatgcctacgtgctggcggaattgattgacgtccgttccgggagaggtaaccagctttcccttgaaacggatttctccgaaggtcggttcctccagcaggttcaggcagcgcaggaaggtacttttaccggaaccggacgggcctacgatgaagaccacttcaccccggtcaatgttcgtggtgacatcgttgactgccggcacggagttgaattccttaaccaaatggctgatttggaacatgggagtgtttccgggatgttcattcattgtttttcagttttctttccagtttgccgagcatccagctgaacagcatgaccacggagaggtaaatcagggccacggccgtcagcggcatgaaggcggtataagtctggctccggatgatgtcgccgcccttggtcaggtcctggagggcaatatagccggagacgctggtctccttcaacagtacgataaattcgtttcccaaggagggaagtacatttttaaaggcctggggcaggataatgtaaatcatggtttgggcatatcccaggccgaggctgcgcccggcttcaaattgtcctttgtcaatagacatgatgccgcctctgatgatttccgccacataggcgcctgagttgaagccgaaggccaccacggccaccaacactttgctgacatccacggagccgaagatgacaaaatagatcatgagcagttgaacgaccaccggagtgccgcggatgactgtcaggtacagtttgcagagggcattcaggaaacggagattgcccgttttgtcatgcgtggcgcggatgacggccaccacaaagcccaccagaatgcccagcagaacggaaaagaaagagacctccaccgtcaccagaaagccgttggtcaggtatttccagcggccttcctgcatgaaattgacataaaaagattctttcaggtccagccatgtattttccagccagccccctccggaagcgtgttgttcgggaccggcagcggatttaacctgcatggccgcataagcgttccgtatttcctccagctttccggaggctttcaatgctgcaatggtgtcgttaatatcctgaaggagagccgtatctcccttgcggacggcaatggcgtaggattcggaagtgaggggctccggcagaatttccagccgatcattgcccgctacgtacattgttgccggatcctggtcaatgacggcggcgtccaccttgcctgccgccacggcggccacagccagcgctccgttagggaagcgttccggctgctggatgttccgtgtgacgtaaatgtttcccgtggccccgtgctgcactccgattcttttaccgcggatatcttcccgcttccggatgggagaacctttgggaacgatgataacctgagcggcttccacataggggatggagaagtccactttcctcctgcgttccggcgtaaccgtgattccggaggcggctacgtctgcctttccggaaactacagccgtaatcacggaatcaaagctcatgtcttcaatgaccagctccctgccggtgcgccgggctacctcccgcatgatttccgggtcaatgcccaggatggcgtttccgtcccggaattcgtagggagggaaagtcgcttccgtcaccatcaggattctgccgttttccgccgctggtgcgccgcagcataggagaagccagagcgtcagcagggctccgagatgattcagaaaggaaatggatggcatgaaagcaaggggaaaaggtgaagtctgaaccggcggggtatatgatttacctgcctgcaacgcaataaaaaactgtttcctcccggttccggtttgtcctgtcccacggcagggaagcggagtagcgggccggacggagaggaaatggcaacgaatatgaatggcatgaacccggaagatacccaggatttttttgtttattagcaagagggagggaatgtatcttgtgataattttcccgattaatatttccaaagggagggaggatcaaacttcctgctttggtggcggtgtatgtttggttttggaaaattgtcatgcatccggaatgtgatgcatggcaaggtgcatggcggaaccatagggctgggtggaataccgcgcaaagcaaaaaaatttgaggccttgcaggatgaagtattctgcaaggcctcacgaatgggaaattggtcgggttgacaggattcgaacctgcgaccccctgcaccccatgcaggtgcgctaccagactgcgctacaacccgatgaactcggaccgaccagggccgtgtcttgtgacggcgaggtgtatataggaaaactttagtgttggcaagagtcttttttcatagcataccttttttgtcatgaagcaagttcaagttgcagtcgtcggggccagtggctacaccgggcaggaattgttgcgcatcctgctgaaccatcgcggggtgaagctggtgtgcgctacttcccgccagtatgccgggcagccgttgtgggagatttttccccgtttccgtcaggttccgggttccggcctgaagtttacggattccgatgtggaggcgattgccgccactggggcggaggtcgcttttctggccctgcctcatggcgtggctgcttcctatgcccgcggcctggtggacaggggcgtgcgcgtgattgacctgagcgcggattttcgcctggacagcccggatgtgtacgaagagtattacgggaacccccacccggatacggccctgatgcaggaagccgtgtacggtttgccggagtggcgccgggaggagattgcccgggcgcgcattgtggcttcccccggctgctatcccaccagcattcttctgcctctcattcccttgttcagggcgggcatgctggagccggaggacgtggtggtctgttccggcagcggcgtgagcggagcagggcgcaaggcatccattccgctgctgttctgcgagtgcaatgagagttttcatgcctacggagtaccgaaacaccgccatttgagcgaaattgagcaggagctttcccatgccgccggggaaacggtggtgatgtccttcaccccccatttgattcccgttaatacgggtatttgctccacgattacggccaaagtgaaaaaaggggcggaccccgagtccgtcggccgcctgctggaagaagcctatgtcgcggccccgttcgtccgccttctggggcgtaaccagcctgcggataccaagaatgtaacacggacgaactgcgtggatattggctgggcttatgatccccgcacgaaccgcgtgattctgatgagcgcagaggataatgtggtgaaaggcgcgggtgggcaggccgttcagtccttcaatatcatgtgcggatttgatgaaacggaaggcttgtgggttctgtagctttttgatacgctgaaaggcactttcaagacgatgaatgattcatcctatattccggttgacgggggcgtttgcgcgccccagggctttttggggagcgccgtaagctgcggcatcaagaagcctacggccacgcgtctggacctggccctgatttattccacggaaccctgcgtttccgcaggaacgtttacgaccaaccgcgtgcaggccgcctgcgtgaaggtgagccgggagcatctccggaaagaaaatatccgcgccatcgtggcgaacagcgggaacgcgaacgcctgcaccggaacccggggggtggaggacgccaggggtgaatgccgcagcgttgctgagcttctggggctggagcctgcagaagtggccgtatgttccaccggcgtgattggcctgccaatgcctatgatgcgcatttacccgaagtttccggaattggcggaggggctttcccgcgacaaggggcatgaggtggcccaggccgtgatgaccagtgatacgaaggagaaaattattgccattgagtttgtagtgcagggcaaacccgtgcgcatcggcgcctgctgcaagggggcgggcatgatcaatccctgcatggcgaccatgctgtgctttatcacgacggatgcgggcgtttcccgcgatgtgctggagctgtgcgtgcagtccggagtgaagagttcttttaactgcatcaccattgacggagacatgagcacgaatgacacggttctggtgatggcgaatggggcatccggcgtgaagctggaaactccggaagatatttacgcattccagcaggctttggcccatgtgatgctggaactggccaagcacatcgtgcaggacggagagcgggtgaccaagttcgtcaccgtgcatgtgacgggaggccgcacggaggatgaagcgaaaaaagcggcggaagccgtagccaagtcttccctggtaaagagttcctggaacgggaatgatcccaactgggggcgcattattcatgccgtgggctactgcggagcaaaggtggacgaagagaagatagacattgacatcgctggtctggccgcctgccgcggcggcgtgcaggcggatactccgtccgacgatttgcggcaagccgtgcaggttcccgcgttccaggtggatatcaatttgaatcggggcgagttttcccatacggtgtataccacggatttgtctccggaatatgtggatttcaaccgttccgagtatgcatactggaaccaggcgaaagcggacggcctgacctgttaaccgtttctgtcatggcgcgtggcaaatgccgccagggaaaggcggggggaatggcccccgccgccgggatgctgatggaggtgcggcgccttctggatgaaggcgccttccgcgcttcccgtgcccagcgtttctgtaccggtgcggcggattgctgccggttccgcctgaccggggagacgccgcatgtaacgctgggggaggcatgggtggcctggaaggcgtggcgtgcttccggacgcacccggttggagctgcctccggacgggagctgccctttcttgagcggtcagggaagatgcatgatttatgaaggcaggccgttggcgtgccgcactcatttctgcgtaccggccgggggcgccttgccccgccgggaggttattgacctgatccatgcgctggaagatattgacgcagcgctgggcggcgatggcgcagcccggctgccggaggccgtggaacggctgtcccgaaaaggcccggcggatggaaggaagaggcggcgatgatgatccgggggtgacgacagtcaggcgtctatttccaagcggaagcacattttttcaggccatgggaacatgttttcccttcgtgtgtccatggctggacctagttagaggatagaagtaagcaggagaatgcctgttcaggcctccgagtccgtttgtttctctttttcctgtttggaggccagatggcgcagggcgctggcggcctttttgttgccgtgccggacggctttctgataccattcttccgcctgtttatcgtcctgctcaatgccgtagccgtgggcgtagcagttgcccacattgaacatggctgtggcgttgccctgttccgccgccttaaggtaccatttcagggcttcttcccggttgacgggcgttccttttccgttcagatggcaccaccccaggttgagctgggctgttgtatgcccctgttctgcggctttggtgtaccagtggacggctttggccatgtccacttccatgccccggccgttgccgtagcaccatcccagcgtgtattgggccgtaatctggccctgaagggctgatttgtgataccataccagcgctttgtccagatccggctccacgccgaaaccgttttcatagcaccatcccagattgtactgggccgtagcatggttctgcatggcggcttcttcgtaccagtaagcggctttccgcgggtttttgggggttccgcttccgttgccatagcaccaggccaggttatactgggcgcgggggtctccctgttccgcggcctgcttgtaccagtatacggcctgttcccagtttttccggctggggctgttggcataaatccagccgaggttgagctgggctaccgcgtggccctgttccgccgcttttttgtaccagccgatggcctggtgttcgtctttttccactcccaggccattgacatagcagaacccaaggtcaaattgcgcggtggggtgcccctgttcggcggctttccggtaccagtaaaaggccttgtcgttgttctgaggggcgccgatgccgttggaataagcccatcccaggttgagctgagctgtaacgtggcccagttccgccgcctgctggtagcagtagaaggcttcctgctggttttccgccaccccgcgaccctgttcgtagttgattgccagctggaacagcgcctgggcgtctcctttcagagctatttgctgaagggtttctacgtcgacggaataggtggagacggtgttttcctgctcgccgtggttgtgggaagcgtcattcatttcacaggtaaccgcactggggaacactgggacaatttttgctctcctgaacttgtgcgctcgccgattctgcacatttcccccataagaatcaagacccgtttttattgggaccggagttcggaaagctttaccgtccagcgtgcctgcggcgagacagggcgaggaatgaaccgccaaggaataggattccggcgccgggttccgggattctcagatctcccagcggagcggtgaagctctgtatttcccccaggcggatgcccgtcagtcccgcttcttcgtaattataactgtacacgtcgttttctccatccatgctggtcagataaatgtcgcagtgggaaaggccgtattcatccgtatagtcgttcacgactactttctggcggaacattcccaccgcatagtcgtccgagtccgtcaggtagataaccagattgtcgtcttcgtccgtgtcgtagccccacatggtgatggcgtggcctctcccttcttcgccgacggtcagagtggttccccagttgttgttgatgctgtttgtcagcttctggtaaacgccgcttctggtgtctccgtcccagaagctgtatgcggaaaataaggggttgtcaacagctcctccgcttgaagactgcgggactgtcagtcccagctctttccagtatcctccggaagccgtcgtcgtagaaaggctcggataggcggtggtatccagcattccgccgttgatccaccagttgtaggcttgttccacggagcctccgctgtttgtccagctcgtggagatggtctggtaaatagccagctgggcgacctgcggcatgacatcgtaagtggcggatttcccgttgggcgtggcggatttcaggtcgcttctggtatcctgccaccattggagaacgttggaggccgccgccgcccagcagatattctgatcataaggaaggtacagccattcattgggccgtgcggaaaccggaggatttagcggattggtggggtggggcttggtcccccatgtccatttggtttttttattgcaatcataccatccgccggattcggagacgttttcaaggaatacgggcgcggcatgaagcgctccgggaaagagcagtgccgccagagccggagagagggagcggagagtcataggaaaaaaggaatatgtgtaattccttttttgttaaaaaagcccgggagggtcgtcaagataataaataggggaaggaggcgaataaaccccggagaggcagatttttttccgaagacgccgggaacgggatgtccgggggacaggacagatgaatgattttcaggggctaccgttgttaacgggggacgagccagggagaagtgggcgcttccggattggacgctacatctgcgggggagccctcggccacgatattgccgccgtgcctgccggctccggggcccatgtccaccaggtagtccgcggcattgagcaggtccttgtggtgttccacgcagaggatggtgtgtccggcatccctcaggcggaaaagggctgccaggagaagggccacttcattgaagtggaggccgctggtgggttcgtccagaatgaacagggcccgttttccgtcttcctccagtttccatgccggggctttggccagttccgcagctatttttatgcgctgggattctccgccggaaagggtgtccgccctgcggttgagactgaggtatcccagccctacgtcctgcatgcttttcaggatggcggcggctctgggcagggaggaaaagaattccgccgcttcgtccacggtcagggccagcgcctgggcaatggatttccctttccaggtgacttccagcgtttccctgttgtagcactgcccctggcaggcgtcgcagggcattgccacgtttcctagaaagttcatgtccacttcaatcatgcccgttccctggcaacgttcacagcggcctccgcgaatgttgggggaaaagcgcgccgccgtatatcccctctgcttggaaagggggagctgtgcgtaaagggggcgcagcacctggagcaggccggtagcggtggccggtgtggagcgcggcgttttgccgatgggcgactggtcgatgacgacgagacggttgaagtgttccgttccctgcacgcggcgcggaataccctttttcccggagaggtcttgcctgactgcggggatgaggcagtcccggacaagggtggattttcctgaaccggaagggccggagatgcaggttagtgtgccgaccgggatattcagagtgacgttgttgaggttgtgcttgtccgcaccggtcagtaccagacgccccgcaggagccgtcttgcgtccggaggcgggcatatttcgcttgcctgaaagccattctccggtggggctttcggcattttccagtatctccgcaagggagccctgtgccagaatacggcctccgttggttccggagccggggcccatgtccaccaggtgatccgccgcggttagaatttgttcatcatgctctacgaccagtactgtgttgccctggttccggagcgtccggagagcgcggagcaggcggtccgtatcggcggggtgcagtccggccgtgggttcgtccaggatgtaaaggactccggaaaggccgcctcccagctgggaagccaggcgcgccctctgcagttcgcctccggagagggtgtttgcctggcggtccagggacaggtaggagagtcccagctcattcaggaagcgcacgcgtttgttgatttcctccatgagcggggtcaatgccgccgccagggaggagggcgttttcagtcgttccagttctcctgccatatcttccagaggaagagccgtcagttccgcgagattgtaggcccggtccggcgcaggcatggtgacggccagggccagaggggaaagacgctggcctccgcaggcgcggcacggaccgttttcctgttcattcaggccggttccccggcaggaggggcatgcccccagcggggagttgaaggaaaaatggcggggcgtaagctggggcagaaggaagcctgtttccggattgcggtagcgggtgtggaaggcccggattgaggcttcctctcctggtatggtgatgatggcccgaacctcgtccggattgatacggagagccgtttgcagggaatccgcaatgcgcgaggccgtattttcccctctgacgatgaggcggtcaatgaccagggccgcgtccggaggcggggggacgggggaacttattacttcaatatcccgcatttctccgttccagtaaacccggaggaagccctgccgctggaagtcgcccagcgtcgctgcgggatcctgggccagcaggttttccgccggagcggccagaatcaggcgcgtgtgttccggcagggaaacgagttcctccgtaatccggtccgggctcttgcgttccagttcctttcctgtctccgggtcatggggcgtgccggcagccgcgtaaaggatgcgcaggtagtccagaatttccgtgatgctccccagcagggtgcgggaactctgctgcctggcggattgctccaggcacagggccgggggcagcccggtaatgctgtccacttccggtttttccggttgatccatgccctgcctggagcgtgccgacaggcagtccagaaaacgcctgcgggattcggaaaaaagcgtatcaaacgccagggaagattttccggagccggaagggccgcagaatacgatgagcttgttggacggaagatccagatccaggttccggaggttgtgctggcgcgcgccgcggatggagatgggaagattcatgtcacgtaaggcgggtaaaggctccctggtgcgtgccgccttcctcaatgatgaggcggcgcgccgtgatatctcccaggaatttggcgtgccggtggatggtgacggtttcatccgccgtaagcgttccttccagagacccctgtatccagatgttttccacgcggatggttcctgtgaccagcaccgtcgtctttttttccaccaccatcctgcgggcggagatggagccggagatgtgctggtccgttttgattttgcagacgccgcggcacaggaagtcgccggaagccctgccgtataagaccaggtcacggcattcgatgttcagccccttcaggtctgcattggcctgcacggtaacgcttccgcaggtctgcaccttggtccggtgcgttctgctgtgtaaaatgacgtcgtccagtttgatatacgcggagcaatggccgcacctggcggaaactgccgtggcggggacggaggtgcttttgcggcaggagaaacattccacctcccgggcaggcgccgggctgctttccgcagttggggggagtgtccagggcggtgccggggaggggtggctgattttcccggagggcgcggtgctgatccgggggatgggatggaaggtggggttcatggaacaaagagggcggcaaaagaacggtccgttcttttgccgcccctgaaagtagcaggcggagagttttttattccgcgtcaatatccagcgtgctctggctggccggagcatgggtttccggctccggagcgaaggcatggacggaagccgccttcttggcggcggaagcccctgtggctcctaccgtgggggcgcctacggtagaatggccgatgaagattgcaccgccttcaatagccagggaggcggcctggatgtcacctacgagttctgccgtgcttttcagttccacgcggtccgtgactgttacattgccgatgaccttgccgtggatgataacggatttggtattgatttccgcccggatgacggcgttctggcctacggaaagcaccccttcggaggaaatgtcgccttccacggtgccgtcaatcagcaggtcatcggaaaaacgcagggaaccgattacctccacatcggagttcagcacattgcgggtcagctgctggacacgggtggtgggggcgtaggaaggcgcggcttccgcaaccggttcggggatgtcctggctcttggctacatccatccagctgggggtggattcaggatttttattgcccttgggggcgggaacggtagtgaatgatccaaacatggcgttaaaaagagggggtgaaaggtaagatgggagctcttgaaactcgtccggtttaatgtacatcacccgcatgtggatgtgaaacaattttctccggcagggataaaaaaatgtgtctgttttttatcgttgcgctgccttgggcgttccggtagtgtgtgaccgtctttccgcgattgttttctgtggatattttcgttttgaaatgagtgatttatttgaaaaaaagctgttcctttccccggccgcgcgcagtcacggcggaaaagcgggctttgcgctgggccgcattctttccgtcatctttttcgtgatcgcgctgggaatgtttttcggcggtcttttcttctggctccagaagcgccaggcatccctggattccggagcggccgcgcggatttgcgccacgccggagatgttgtccggagaattgaaagccgctctgaaagacagggtggactatagtttctggcctccttatcacatttctccgatggaaaagcaggacctgctgcgcaactgcctggcggaggcacagaaatatctgagcgccgcggatgtggttcaaaaatcctcttttgtgtggaagtccctgcaatcgcttcctttaatggtcaggcattacgccatgtctccgcctgaggcgattgtcagcaggcctaaggggcctaaaagctttgccgtgtttgaggtggaggggcatccctgcgcccagctcctggttggttttgaaaagactcccgatatggaattctgttttttcaaggatgaacaggatggttcctggaagctggactggcagcagtttgcccgctttcagccgatgaactgggaggattttgtacggggaaaaggggaggatattgcggaattccgcgtatggatggttcgggagcgcatgtcggaaaataaggatgactatgcatttaagctgattgctcccgggatgaacggttccgaagagcgcagcattgcccgtcccatggtgtatgtccccagaaaatcggaaatgggcaagcgtttgttcatgttgtttaagattaatgaggagatggaacattccccataccgggtgttgaacgccaatgacgaggctgacatgctccgcgcgcgggttcttctttcccgcagcaaagagcccaaccgcaagggggaatattcctttacgctggtcaggctgctgggggaaggctggtacggcctttctttcccagaataaaaaggaaggattgggccggcctcttgctttgcgggggatggggatgcgttttaccggcgatggaaacggggagggggcccttcatgtgggcgcctggggcggtggggccggaaagggggcgggcatggcgtaaggcgtgcggcatgatgtctgcggcagacgcccgccggccagaaagggccgtggtaatgcggcctggggttccatgcaggaacatggcagccgcggtagatgtccctgatgacgtaaatgggtgcgcctgcaggggtataggcgtaaatgggccgtccgcatggggaatatccccagatggggaatccggaggggtcatacaggaaaacggcctgccctaccgcaggtacgcggatttcgccatgcaggtgaatcccggctttcgcagcgggggaggaaaaggccaggagggcagatatggcgcttccggcgcagcaggcaagaagatggtttccggcagggttgttgttcatcggttttttgaatggtggttgacggcagttatccgatagagcggagtccccgttccgttttgtgtaattttccatgcccgtcattcagggagggggtaaggggaataccgtcttgacctggaggggagccccgggcaaagtgaccgcgtgacgagattcagaccatgcattgatttacacgacgggcgcgtgaagcagattgtgggcggaaccctgacgcaggatggcgtctcattgcgcaccaatttcgtctccgaccgcggcgcggcatggtatgcggatttgtaccgcagggacggtctgagcggagggcatgtgatcaagctgggcccagggaacgaccatgcggcgcgggaggccctggcggcatggccgggaggccttcaggtgggcggcggcatgacgccggaaaatgcggaggaatggatttccgccggggccagccatgtgattgttacttcctgcctgtttgatgcggagggaacgctgcggatggacaggctgaaggatcttgtttccgcagtgggcgcggaacggctggtgctggatttgagctgccgcagggttcagggaggctgggccgtggccatgaaccggtggcagactttgacggaactccgggtaacggcggagacgctggatgttctggcggaacattgcgcggagtttcttattcatgcggcggatgtggaagggctctgcaccggcattgaccgggaactggtggaaatgctgggaaactggcgccgcctgcccatgacatatgccggaggcatcagccgcattcaggatattgacgaaatagacgctttgagcggcggaaccatggatgccacggtggggagcgctttggatttgtttggcggcggtttaatcaggtacggggatctggtggccaggcagcgcgggaagtccggcatggaaacggtatgaaactggctctgaaagttattcccaatgcgaagaagagcgaggccgtgggatgggaggaagatccccgtgccggccgcgcgctgaaactgcgcattgccgcgcctcccgtggagggaaaggcgaacaaggccgtcgtccttttcctgtccgcttggctggatattccccgttcctccatcagcctgctgcgcggggaatcctcccggctgaaagtggtggaattgccggacggatgcgaaggaaaacttgcccggctgctttctgcggaggatgtttccggcgcttaggaaagccgtgtggaaggcaggcattttctttatgggtagaagggttgcatcaggcgcggtccattacgcgtcaaacgtcatccatgtcttagcaggccgttgacgcatccggtaaaagaatttacattgcccgcatgagcgacgaagagaaagagaaaaacgcggaagcggaagagctggaggcgcaggaacaggtgcaggatgctcctgccgaggagaaggtggcggaaccttccctggaagaggaattgcttaaatggcgggatgccgccatgcgcactgctgcggaatatgataactaccgcaagcgcatggtgaaggaaaaggaggaatgcgccaagttcgccaatcagcgcctgctggaagaacttctacccgtcattgataattttgaaatgggcatggccgccgccagcgcagatgcctcctccatgatttacatcggcatgagcatggtgaagaagcagctggacgaatttctcgccggcaatggcgtgagcgccgtggagcctgtggtgggaagcatgtttgaccacgccacggaggaagctcttcagcgggaaccctccgaccagccggaaggcaccgttctgcgcgttatccgcaaggggtatatgctgaaagacaggcttctgcgcccggcgaacgtggttgtcgcccatactccggaccccgaaccgcaagtctgaccgtttttttaacattcacgccacatggctaaaaaagattattacgaaattctcggcgtttccaaggacgctactgacgatgagattaagaaggcctatcgcaagctggccttaaagtaccatccggaccgcaacccggacgacccgtccgcagaagaaaagttcaaggagctgggagaggcctatgaggtgctttccgatgcggacaagagggctgcctacgaccgcttcggccatgccgcctttgaacagggcggccccgctgcgggcggcggttatgccgggggagggttccaggatccgatggatattttcgcccagatgttttccggaatgggcggttttgcggatatgttcggaggcgccggccgcggcggccagaaaaggtccaccaagagacccggttccgatttgcgctatgatttggacatcacgctggaagaggctgcgaagggatgcaccaagaagcttgagattgagcgtctggtgacttgcaagacctgccacggcaccggggccagggatggaaaggaagcgttcaagtcctgtcctacctgccaggggcgcggcatcattacccagcagagcggctttttcgtccagcagtccacctgccccacctgccacggcaccggggaaatcatctcggacccatgccccgtctgccgcggggaagggcgcgtcagggaggattcccacatcaccatccgtattcctgcgggcgttgccacgggcagccagctccgcatcgccggggaaggggatgccggggtgcatggtggccctaccggggatctgcacgtgtttattgacgtcaaaccgcacgatattttccagagggagggcaacgacctgagctgcacggttccggttccgctttccctggctgtttccggcggcaggctgaaagtgcccacgctggaaggcgcggccaccatcaagctgccggaaggaacgcagaacggcatgatcttccgtctgcgcggcaagggggtaaaggcccttcgcagttcggacgtgggggatatgctggtggaggtggaggtggaaatcccctcccggcttaccaaggagcagatggataagctgaacgcgtttgcctctgccctggatgaaaatcggaaccagccggcttgcgtggagtttgccgacaaggcggcgcgttacctgaagggcaaataaggtccgtttccctttttcagacatggcccgctttttcctcccgccttccgaatgggctgctcccgcctgggagctgcgaggggatgaagcgcaccatgccgccagggttttgcgcctgaagcagggtgactcctgcatcgtgtttgacggttgcgggcgtgcggcccacgctgtggtggcggaacctccgcgcagctccggcgtgctgctggttccgggggaggaatgccctccttctccccccgtggcccatttgacgctgtgccaggctgttcccaagggggccaacatggatctgattatccaaaagtctgtggaactgggtgtttctgctattgttccgctcgtgacggaccgcacgatcgtgcgcctgaatgcccgggaggctgaggccaaaaggcagaaatggcagcgcatcgccttggaggcctgcaagcagtgcggccagaacacgctgccggaagtggcgcttcccgttccctttgcggaatggctgcgcggaggaattccggaaggactgaatattatcgcctctctggcgcccggagtgcggccggtcagggaagtgctggagaccgcccgttcccgttccgttcgtcacgcttctctgctggtggggccggagggggattttacgggccgggagacggccatggcgttggaagcggggtttgttcccgtcacgcttggccctatcgttctccgggtggagacggccgcctttttcagcctgtccgccatgcggtacgccctggactgagttttttcatacgcattcccatgttcaaaaatatcattttcgactggtccggcaccctggtggatgacctggccctgacgctggacgcctccaactacgtcttttcccaatacgggaaaccctgcatgaacagggatgaatttcgcgcggaattccagcttccctatccggactattatgcccgggtgttgccccacgcggatctggatgaactggaagaccatttccggtacgccttccgcgtttccaatgctccggtggaagtgctgccgaatgcccgggaattcctggagttctgccgcgcgcgcggcgtgcgctgctttattcttaccagcgtggacgccaaggagtttgatacccaatgcagggagctgggcatgatggaatattttgaagccattcatgcgggcatccgccataaggatgcccacattcataccctgctggcccagcacgggctgcatgcccatgaaaccgcgtttatcggggacatgcagcatgatgtggaaacggcccaccacgcgggcatcacatccattgccgttttgaccggctacaatgacgcagcgcagctttccaaggcccggccggacatgatcgtcccggacctgcttgttctgcgcacgctgatgcgccgttacgcgctcccttccgatacgcaggattctatcaatatcaatggtcttgaactggataccttcattggcgttccggacgaggagcgctcttccatgcagaccctgaaagcggacatctctttttatccggaggaggctttgtccggcctgaacgatgatttttccagaaccgtctgttatgattccattgcccgtgcgctccgggcggaggccatggcgcgtccacgcaagctggtggaaacgctggcggaggatatgggaaaggtttgcctgaaggaattcggcgcgcggcacgtggttgttaccctgcgcaagtttattctgccgcggacggacagcgtttccgtaacggtgcatgtttcccggcaccggtaagaaagaggttttctaccggatatccaccgccttttcttcagggattttcttcccgtctttggtgaaagtgtttttttccgccttgacgtcaccggtatggcgaatgcggatggcggttccgttcttgaggtcaaacgtgtttccggtaatggtgatgttccggtgaacgtccccttccggccgtggagcgtgcggcacgatctggatgacggcttctccgcattggataaaggtattgcgggaaatggtcatgttcctgaccacgccggattcataccagccggaggcgtcatcttccaccaggatggcgggcatgcccgttttttcaaaccggcaccgttcaaccagcaccggcttcctggtggtgagcaggaagcccctggtgggaatgtggcggcataccgtattgctgatgtggacagatggcgtccatgtgacgttttccacaacatcgtcaggctggatgttcccgggattgggatgttgcaatgtaagttctatttccttttcattgagttgtttgacgccggaaacggtattggatgcataaggcaccagcgtgttgcagcaaacataatcgatccggtctcctgcggcaaaggcgtcaaagccgaaggtctggggatgcatgaaccggacggtgattttgttgggggccggcctgtctataatgcgcaagtgggttccatgaacattaacggcgtcgtcatgggaggctcccagcacgcaatccttgacgatgatttttccccggcatccggaaaagtgcagattatccgcccaggaggaattggtgcggagggaacgggggcgcggggctattttcaagtggctgaacatgatgttctcgcagaactgggcaacgacgcccatgccgtgcatatagtaaatatggcagttattccagaggatgtttttgcttctgtattgaaagaagccgcagcagtccctccgggtattgcggttctggtaggattggcccggtttcatggttggtgagccttccttgaacgtgatgctgatttttccgggagacaattctctgatgactgttttcccggggtcgaaacggccctggaaagtgccggaggcggaatcgaaaactttggaataccctcccatgcggaattcccagccgggtccgtgccaggtcaggtttccatccttcactgtgtacaggattccgtccggaatagttgctttcatggtatccccttcaacttccgtgaccagaaattcccccatggtcggatgcaggtaatcaaaccccaggccgttcagggaaacgttttccgcatgttccatgcagacaaagatggcttttccttccagcaggatgtcggtggctcccggctttccctccaggcgtatgtttttggcttccatcaggcggatagccatggccttgggctcgttgggcgcatcgttggtgttggaaatctgcggttttccggtcatcagggcaccgtgtttgaagatatgcctgccgggcatgaaccggatggtgaccggggcctgtttggaaccttcccccatcagcgccagggagacggcatgttcccccggatggatgacgagcgtatctccccgcgccatgatgagacggttggccggcgccatgcttttccacgccgtggatggggccgttcccggattgccgtcatttcccttgtccgggtctatatgccagacatggtttcctgcggattgcgtgcgctccgtccgttccggataatccgctgccgggcatggccctgtcaacattgcgagaataaaaagcagggaggccacggggttttgcatgctgcaactcctacaggaacacggttttcgggacaaggataattcttgcagggccgggagaaaaatccgcagcttttccatggttcacctgggaggcccctgtttttcatcctttctgccggggcgggaaagaaagcctaccagcttgtcataatacgctttggatttgtcgtagtaggattgagggtcaatatccagtttggtgcggaacaggagccagagcttgtggaaggtgttgacgcggtagcggatgtcgaaaatacggaagccgctcgccttcattttgtccagaatggtatggtaaatgagcgccatggcctgcgccggaataagggcggctttgtcttccgggctgagaaggttgtattccctctccgcttccgcaaagaaagtttccgccagatccgcttcatatttcagcagctcctgaagccggggggaatacaccctgcagcgcaggtcttccagggtgtatccaaagcggtccatatcctccttgggcaaataaatgcggttggacttgccgcagtcttccgccacgtcccggatgatgttcaccatttgaagggcatgccccagggcaatggcgtacggataggaggcttctcccgcccccatgatgcgggcagaggtgaggcccacgcagcaggctacgcagtaggtgtagtccagcagttcatcgcggctgcggggctgctgctggcagatgtccgaacggcagccttcaatcaggtgcagcatgggagtggtgtccagctccaaatcctggatgagggctatgatgtcctcctccagttccgtcagttccaggccttctccgccgttgatgacctccacccagcggttcaatgcgtcgtggcgttcgcggggagtcatgcccggttcgtccacgatatcgtccaccgtgcggcagaaagcgtaaaattccgccatatggcggcgttcttcttcaggaagatcaatgagggcaaaggccaggttggacttggccttgctggtgatggtttgggcttgagtcatgtcttgacggaaaaaacgtgcctgcgaaaaggataaaaatcatggaataaggccccagtgggaagtaaagggccacaggcagaagctggcggggcctacgatgttgtactggcggacggggccccagtaccgggaatcaaaggaattttcgcgggtggaattgtcccccagcgccacgtattcacgcagataggggcgtttgctgtcgttggacagatgaacggttcccccttccgtgatgtaagctctgccgtccagcaggctcaggggggcgggaagggccacgtagccgcagggctggtaggggggcttgccggaagcgaccctctggatagtccattccgtggctggtttcccattgacgattagctgggagttctgaatggagagggtatctcccggaatgccgcagaggcgtttgacgtagtgggttcctccttcctggccggtgctgcttcccttattggcgatgccttcgatgccgcgtgtatcaaagacgaagacttcccctcgttccggcttgcggaagtggtaggccattttattcaccacgattaggtccccggcgtcaaaacgggcattgacgattgtgtctccgggcaggtagcttctgaacggggtgtgccgttcggcttcaaagcgcggttcctgattgaggaagtagcggcgcgtttccgcttccgctgctggaatttccagcttggagccgtcatcgaaaatcacgttggtcaccgtgagcagaagatacttggtggcaggttcgaaacggacgattttcttttccttggaggccgtttcgtgtacataggagccgccgtacaggatcatgtccccgattttctgcatcagggtgggatccccttcctggggaagggcgcggattccgttcagggagggctgcatggaaccggtcgggatgcggaagggctggactacataacagcgcaaacccaggaaaatggccagaatcacgaacagaacttccacgttttccgccaaggcggaaggaaccgctccggggatggattccagcgtggattccagtttggcggtaatggtttccgcctgctgcctgtcaccccggtaaagggccgttttcagcaggtcgcggctttcttcaaactccgccaggcgttcgggaggcagaagatcgcgattgtagttgatgtagcggcgcactgctttcagggccatacgtcctttccggcgccatttgggcgtgaaccaggccagaggatgatccagaagaaacaccagaacggcgtttgcagccggaaagcaatcgtaaagggcagctaggatggacttgtgcgggctattcatgaagtacggcattcatgatgccccgtccggaggcgtcatggaagtttattttacgttacggaagccccatttttccaggattcagcaaattttttgggtccagggcggatttgaccagttcgtgcaggtggtaggcgccttcccccacggctttccggaaccatttggccttcgccaggccgatgccgtgttccccggtaatggcgcctccgtgtgccagcacccagtggaacagcctgcccacacaggcgtccgccagggctttcttctctggattcgcataatcgtccaccatgatgttggtatggatgttgccgtccccggaatggccgaaacacgcgatgtccagccctgtttcccggttcagggcctcgcagaattccaccagggccaccaggcgcgacctggggatgacgatgtcttcgttgagcttggtcattccggttgctttcaggctgtaggaaaattcccggcggagttgccagatggcttccgcctccgcttccgtgtctgcgcgcagaattccggtcgcaccgcattcttccagcagggtgcatagggaatccagttcctcccgcacggcgggccgcctgccgtccacttccacaatcaggtggccgcggcagccagaaggcagggcgctgtcccccagatagttccgggcggcgcggagagtgaaactgtccgttatttccagggcggagggcaggtgcccgctgttcaggatgcgctgcacggcggcagcggccagcgggaattgcgggaagccggcgctgagcgcgccgaatgcttccgggtgggggatgagcctcaaaacggcccgggtgatgatgcccagcattccttccgaaccgataaaaaggtccccgatatcgaaccccgtcttgtttttatgggtgcgtccgccgcattccactacctctccgctggcaagcaccacggtcagccccagcacgtaagctctggtgactccatatttcaggcatctggggccgcctgcgttcgtggcgatgtttcctccgatgctgcattcctttctggaggccgggtccggcgggtagaaccatcccagagcacgggcctcccgctggagatccgctgtgataactccgggttccaccacggcaacgccgtcttccggggatatctccaggatacggttcatccgttccagggaaaggctgatgcctccgcgcacgggaacgcaccctcctacgtatcccaccccgccgccgcgggccgtgacggggatgttcatggaggatgcgtagcgcagcaacagggagacgtcctccgtactttccgggaaaacgactgcctccggcagcacggaggcgtaccatttgtccccggcgtgcgccgccagcacatccagggctccggaaacttttccaggccccagaatgcgggaaatgtcttctttcaaagacatggattatttgagaatgggggtgcagaagcagtccgggcggtggaaatccggattgccggaaagatcgtccgccgtagtcaggaaaatctggtccggagtatccaggatgaacgtggctgccagcttgcagtcgcggatgtccacgccgcgcagttcgttcagcggaatccgggccatggcgcaccagctttcatccgttaaaatgcacttggtatctacagccagcggagcgggaatgtcttcattggcgcggcgggtgtcggaaaaggcgcaggcccaccatgcgccgttgggcgcgaggttgaattcccagtaattggtgccgtctccggcggccatgaaccattccgccaggtcgtaacgccataattccggctggaactggccgggccgggcttccgggtggatggtggctgccttgctgcgggatgccagaaaccagagaaattccccgtccgtggcgaaggcgaattccgcgcttggctccacatcatagccgaaccagtcgttgacaagttcctggcggggcagggaggcaagctggtcaaaacttccgttgaaggcccattggtgaatgattacttgcataccgccacatttggacagttttcaggttttatcaagccagaacgtcttacaggcttggatattgacgtgatttctccattatggaggccgtcatgcattttcaaaggacgctgaatcggtttccccgcgaaaatgtccccgaatatctggctgtgttcatcggcggtttcggggatattttggcaggttgtctgagccgtgtggagaagggatttcccggttttttgccgggtgtggcgtacgcaacggcttattaccactgggatggaggcggctgcggcgtgtttctggacaggtgcggaaaaatagcggtggagctggaagaattgagaaggagatatccctgcctgcctgtcgtgttgataggacacagttacggaggctcctgcgcggtggaagtagccaggagccaggcggttcaggctgctccgctttgcctcctgaccatagacgccgtggcgcgccggcaaaagagcgtgcgtccggcctgtgtggaatggtgggggaacgcttacctgcgggacggaggcggcttcatggacgcggtgcccagaataggcggacgctgggggcattgctccggggctgatgccaatctggctttttcaggcttccggcgtgaccggaagggccgcctttattcccaccggcgtcctgcgcccatgctttatgagccgcccggggaagaagcgtgcagcctgtttcaagccgcttcctcctggctggaaggaaatcttccgggttgagccgccggagccgtgttaccgcttcaattcatcccacttcaccagttgggagagaagttggctgatgaggcgttccgtctgttcccgggctttctcttccgataccctgatcttgtccccgtacgtggtggaaatctggaaatagcaccagcgttgatccatgccgtgcagaaccctgtctttcatatccatcagggtgcggatcaagtggtcttccgtcatgtggcggtggccgataaatacgtaataatgcatgctgtccagaatgacaggttgcggatggtccggagcgatgttctgctgggatttcagcttggtcatcctgatggttccatggccttccacggggacatccgccgtggtccccgtcaggttaaagtggccctgggccggaaggcagcgttccggacggtggatggagttgtttaaatcatgaccggatctaacgatggaaacgcggcacagaacgggtacggtttccgtctcatctaggctgatgggaagttcctgcacgtaatccgctttggaaaattccgtgtccggggccaggaggctccgttcctgttcagattcctgacggcgcgtgccgtgccagccgtacggattcatgcctgtggggagatccatgctgatggaggattcctgcacctcccccttgcggggcatcaggtaagtgccgccgagcatgacggccatcaggaaagggatgatgagaattttgagcgttttaatgttcatggcggcggaaacgcttaatgggacttgttcattttgacaaccagtttctttcgttgtgacggcttccatatcagctccccggccagcagggagtggacggccgccaggccgaaaaggctgatggggaagaaaaacagcaggccggaccagtcatgccaggtttttgacgcaaactcgggatctccgtattccgccatcaccacgatactggtgatgcggacaccgttgccgatgacagccaggggaatcgcgctgaggaagagcacgcattttttccagaatttcaggtcggacaggtaggcccaggccgcggacagcatgagcagcgccatcagggagcgcatgccgctgcaccctcctgcaatattgaaagcgtcccagtgtccgccggtagagcggatattggtgccctgcagataggtatctaccccgaagacggttgctccccaatgccccagctccgtcgcgatgatttgcagccctaccgtagcctgctggaaggagggcagggggatgcacagccagaaaaagagcagagggaaagcgcacagcctggcggtttgcggtccggccagataccaggccccgcccagtaaaatcaggggaagagcgcctacggccacgcggggctgccccacgcggaaagaaagcatcagaagcatgatcgccgggatgaaaagaatcaggccgcgccagtccatgcgtctgggagcctgggcaattttctttctggcatggtacagcatgaaggcgatgatgggaaccaccagccagccgtgttcataatccgtttgcttgttccaggaggaaatgagccactggatgctggtttcatttccggatgaaccgaattccgggaatgccagataagtcagcgccagcagcagtgtgctcacggccagggaggcgatcatgggggcggtcagaaatctctctttgccgtcaggaacgggggaatccatcatggagaaaaattaaattgtgagaattaagtattgcgattatgcggacctgtgttcagaatgcgtccgcttttcagtttccggtatgaagattatcagcggtacagcacacagagaacttgcggagcgcattgcgcaaagcgtaggcattcagttgacgaacgttacggtgaatactttccctgatggggaaagttttgtaaagataaatgaaaacatccggggcaaggatgttttccttattcagcccacctgcccgcccacgaaccataatatcatggaattgtgcgtgatggtagatgccgcccgccgcgccagtgccggacgcatcacggctgttgttccctttttcgggtatgcccgccaggaccgcaaggaccagccccgcgttcccattaccgccaagctggtggccaatctgctgacggccgccggagtggaccgcgtgctgaccatggatctccatgccgcccagatccagggattctttgatattccggtggatcacctgtacgccgcccccgttttaatccgtcacctgcgcgaacattatgttaaagacctcaagaaactggtcgtcgtctccccggatgtgggcggcgtgaaaatggctcgcgcgtactctgacgctctgggtgcggaattggccattgttgccaagcaccgcgtcaacgccacccatgtggaagccatgaatgtcattggtgacgtggaaggtcgcgatgccgtcctgattgacgacatgacggaaaccgccggcactctgtgcgctgccgccaatatcctgaaggaacggggagcccagcgcgtgttcgcctgcgtttcccacggcgtgctgggggacatggcccgcgaacggatttccggttcctgcatagaacgcgttcttacctccgacactgttcccatggcctatggccccaaggtggactgtgtcagcgtgggagatctgctgggtcatgccgtgcagcgcatacatgacggagaatccgtatcatcattatttgacatttagacaattttagtgcagagtcctgcgccctgacctgagtaccggtttacgcgggttcggaaatcccggcggggcctctgcctgaacccgattaggaaacatcatcaatcaacactcaatattgcctctataaaacatggctacatcccattccctcaaggccgaaacgagagcctgcggctccggtaatctgaagcaactccgcagccagggcctggttcccggcgtggtttacggtcccggttttgacaacgtcaatatccaggttgacgcccgtgaatttgcccgcatgctggcttccgccgtttccgaacacatcctcgtggccctggatatcaacggcaaaatcgtgaaggttctccttaaggaagtgcagcacaaccccatcaccaacgcctgcctgcatgtggacttccaggctgtgaccgacaccacggtcatccattccattgttcccgtcattctggaaggcgattccgccggcgtggccctgggcggcgttctggaccagaccattcatgaactggcaattatctgccaggtgaaggatctgccggaagccattaacgctgacgtctccggtttgaagctgggtgaaagcctgcgcattgccgatctcaagctcccctccggcgtaactacggaactggccggcgatgtgatcgtcgctattgtggaagctccccgtgtttccggcgaggaagcggctccggctgctgaagaagctgctgccgagaaataagtttgataatactgtttcttcttttaccgggtccggagccgtttttgcggctccgggcttttttttgtcgccaacagggcgtcttttgataaagtgcaggatacgtatttgtctgatcaatctggaaaaagccttagatttatgaacaagtccctcatattggtgttggccgcattcgttccgcttgcagctgcagatgaagtaaaactcaaggatggaaccgtttacaaaaattgcacggtagaagtggaaacgccggaaagcgtcagcctcctggttcccgtgtccggtgggatcaaggagtccgtgatcgtgaagagggatttgattgaatccatcaggaaggcgactccggatgaactggaagctgcccgaatcggcaaaacatatgccaaaccggaaaccatgaatgccggggatttggaaaaagccttggcggacctggacaagactattaaaaagaatccccaggggctcgcccatgacgctgccgtcaaggcaagggccagagtagtggttttgctggaagagaagaaattgacggaggaagcacaggccgcccaggatgccaaggaggaggcggaagtgaccgtgcgcaccaaatacgatcatgaagccaacaaattgctgaagcgtttcaaggcgcttgccgtgcgcaatccataccgggccatggccgtgtatgaccgcttgcgtgacggttatcccggttccgccgctctggcggatgcctatccagatgccgccagaatcgccggacagctcaaccgtaagctggaggtcatgatcgccgctaaggaaaaatccctggagaaggaacgagaagccctgagaaaagaggaagagaagcgccgcggaaatcccaaattgacaacggaacagcgtcaggagctgatggatgctttcctgaaaaggcagactgccatcagggaacgtgaaaaccagctcacggaagtgtaccgtgctttgcgcaagaaggtcaaggaacgcggggaccggtggtttgaacctacggcaggttctttggaagccatgagagaccttaaactggtagccgctacggatgcggaacgcttaaaaaaacaggacccggaaaacggagccggttccgctgctctggaaaaggcctggaatctgtgtgacgagaaaaaatttgatgaggctatggaggttctgacggagctccggaccgcccaggttcccagggaatactatgaggaactgacggaaacggtgcgcgtgggattgcgggaacagcgtgcccgtgaacgtgccgaacgtgcggaagcggcgcgcaaagcccgtgaagaccgggataagaagcgccagaaggaaagagacgaggcggccaaggcccaaaagaaataattctgccgttttccggagaaaacgctccagggaaacatgtcggaaatagcgtttgcggatgggatggatcaagtatgggttgattctatcctatccgtcaggctttccgtccgtcggttttgcgcaatttgtcgttaaagattcctgaaattttttctgtcggagcggggccggaggcgtgttcctttgacggtctgcatgtttttgcgggaagaagagggcaaatcttttcccatgcgatatttcctgctttcttccgccgcgtcttcagtatagaagtgctgcatgaggaacgcttcttgcaaacgggtcacgggtgaaacggacatcagcatggaactgaacctggacggcacgggatgcgccgccgtcgcaacggggcatgcattttttgaccacatgctggacttactggcccgccattccctgatggacctgacccttcaggcccgcggagacctggaagtggacgcccaccacacggtggaggatgtgggaatcgttttgggggaatgccttaaaaatgcgctgggggacaaaaagggcattgtccgctacggctgttcctacctgcccatggatgaaactcttacgcgcgtggtgatggatttgagcaaccgcccgtatgttgctttccgtatcccggaaggcggtttgccggatgctcccaactttccgctgaccctttgcgaggaattctgccgcgcgctggccaataacctgcgttgcaacctgcatgtggaagtgctttacggcagggatggccaccacattgcggaatctgtcttcaagggcatcgcgcatgcgttgcggcaggctgcggcgattgatccccgggccgccgggacgctgccttcaaccaagggaatgctgtaaaatacatgaaactgggcgtgattgattacggtgcgggcaatctccgcagtgtgctgaacacctttgaggccgccggcgtgacggggcacctggtgcgtacgccggaagatgcggcgggcgtaactcatttggttcttccaggcgtgggcgccttcggcgactgtgcggaaaagctgcgccgccagaatctggtgcccctggttcgggagtggatagagcgggacaggccttttctgggcatttgcgtgggctatcaggtcctttttgaaagcggggaggaagacgaacaggtccccggactgggaatcctcaaggggcgcgtggtccggttttcagaatcggaactcaaggtgcctcacatgggttggaacagcgtggctctagccgatcccgccgatcccatctggaaaggcatggggaaggaaccgtacttttatttcgtgcattcctattatcctcagccggaggatgaatccctgattgccgctttctgcacctacggcgtgcgttttgctgccgctgtcaggcacggcaatctggtcgccacccagttccacccggaaaaaagccagaaactgggcgtgaaactgctgaaaaactttatttccctgtgagccggaaattgccggctcacagactgccgctctttttcctgacagcaaggggcaaggaggagcggtgaatcaaatgaaacgtcattctcgaaaagcagccttattaaaaagacgccgggattaatttcattgaaacccttcggacggcacctccgtagaccttcatggctcagtttttccctgtatggaaaatagccagggcaagaggagtggcaaatttatttcttaccgccggttcctggtcaatattgcttagggggcggggaatatttgttgagcggggggcagagggggggaagggatggtaatctataaaaaaagaaccgccccttcgcggagacggttctttttgataagaaagcaaggagcggatatttcgtccgcatgggccggattttagccgagcaccttgtaatactgaaggtgaatctggggattcaggcgaaggcgttcgcggatgggcctgatggcggaaggttccgcagagaacgtgtaggtcacatactgcccggcggaaaggtggttggattcgtaggcgaattcgcggcggccggcgttttccgtggcggtgatgtcggcgccttcttccttcatcgcggcggctacggtgctgatcaactcctcgacgggagtttccgtacccttcatgttgaatacgataagagcttcgtaatttctcatggtcttgtgataattagaaatgtgtcgtgcgaacggtgcgcaccttgcgggcaagtaaggtgcaatgattgccttcagaaagcaagcctattttttgccttgtttccgggaacatgccgtttcctgcgttttactctccccacggcgcggaagaattgttctgcatggcgtttcctgccgttgtccttagcggaggagggcgggatttccggtgaggaatccggaaaagcggcagatagaggcggcggagagtttttccgggctttctgtcctgccgcctgaacaatggtgccggttccaaaaaaggatcatgacaaggaggccttggaactttacgccgcagatgaattaacgatgcgttattttttggaatcaggaagaaggagaaagggcttctccctgatggggtgatattccggtactgggattcacccccggaacgggatggtgcaggtatggcgggaaaaattccggaaagaagaaaaacgttaacgcctccgcgccatctgtacggccagctggaaggcgtggatggtgctggacggattggcttttccggttcccgccaggttgaaggcggtaccatggtccgggctcagccgggggcggggaaggcccagggtgacgttgacggcggtatggaagtccaccagcttcagcggaatcaacccctggtcatggtaaggggccagcacggcgtcatagttcccttccacggcatcccggtacacgcagtccgggacggaaggcccgtcaaatgcagcatccggatggatcgccctcagccgtcccacggccggggcaatgatgttcccgtcctcatcgccgaaagcgccgtgttccccggcgtgggggttcagggctgccagggcgatacgcgggcgcatgattcctttgcggatgcagaagtctttcagcagggttccgatgcggaccagttcctctgtttccagcagggaaggcacgctttggagggaagtatggatggttgccagccccaccgtcaaccgtttcccggtcaggcacatggcgtaattgtccgttttcaggcgttctgcaaagaattccgtctgccccggccagcggaaacctgcctcatgcagggtttccttgcagacgggggcggtgacaacagcgtcaaccgttccttcccgcagggcatgggccgcctgttccagatggtcgaaggcgtgtttggcggattccgcattaggccttcccgggggaagctccactctcttgccgatgaggcggtactctgcgtcttccgggagttctccggaggcaagcgcggcggagatgacttccgggcctatgcccgactggtcgcccagcgtgtatccaatgaccggtttcatagtgcggcaacaggagggattacaattccgcgggttccggcattccggcaggggaagcgggaatttcttccgcggggaaaacaggagtttgttccgccggaacagcctgcagggctgccgcccgtttttccatgttgatgacctgtgtcgttttttccggttcgtcggggttgcggagttcgaattccaggtgggagttggtggaccaatggtaataaatggtggcgccgagggctgccagcaccagaatcaggagaatggaaccgaagaaggagcgcatgcctctactgtgtcccggaggaggggggaattcaagaaattatcaagaccgtctgcgtgggcgggcaaacgccgttaattgccgtgtatcttcatttcctgaaagaggaaagaagggtaagtaaaaagaggcagcccggcatgagaagatccgggacagttcaggacaggattttcatcgcgaggaacaggagcatgagcaggatggcaaagccgatgattctgcccgccatgctgccgtctttcccgtcctggatgcacatggggcagttttccgggccgttcatgccgctgcatcccatgccgcacgcgccgcagggaaaatccgcctcccgctcctggactcggtcttggagaaggagttccagctcgcgcacggaaggctccacgccgtagacgacgatttccccgtcaatggcgagtgcgggaagcggcgtcccgatttgttccggaacggtctcttcagcctgcatctccggattgacgcccagatgggccaatgcctggagggtattggcgcgcagggtgtttcccgggtaggcccggctgtaaaaaagctgaatcctggtcatggaactgggtatgtcaggaacgcttccgtttgggaagactcttcttccaacaaataggacggggctccaaaggtcaatgcgtttttccgtgtcatgacatataagtgttgtacggaaaacattttagacttttcaaatgaggagggaacgggcactatcccgccggtcccgccatgaaaaagctatctctattccttttgaccctggcctgtgtattccagttttccgcccaggcacaggaacggcccagttacattgccattgaggccaattccggcaagcttcttttcagttccaacgcagaagaaaaaaggcccgtggccagtctttcccaggtagccaccgccatggtggctttggactgggtggcccgcacgcggttgccgctggacactttcattgccgtgccccaggaagctttcggcctccgtgcgggcaatcccatggatctccagccgggagaccgcctgacgctccgggacgctttgtattccaccctgctgggttcggacaatgtttccgccctgactgttgcctcctttgtggggcgtgacctggtgtcccgccggggcggcggcgcccccattgccgcttttgtggcggaaatgaacaatttggcccgttccctgaggatggccaaaacgcgctttaccgctccccacgggctggacgccggcaactccgtttccacttcctgcgcgctggatatggccttgttaggcgtttacagcatgcaaaatccggctttttgctacattgtttcccaggcgagccggcgcattgaagtgcagtcccagaccaagggcaggacgatgtacgatatttccaacaacaacaggctcatgagcgcttccggcgtggacggcatcaaggcgggcacttcccgcgccgccggcccctgcctgctgctcagcgtgacgcgcaacgctatttcccgccggagcccccaaacggggacggaggtgatttatccgcagcgcatgattattgcggtgcttggttctgcgagccgctattccctcgccagggagatgatgaacaccggctggcgcgtttgggaaaactggcaggcttccggcatggatatgaaggaccccaaggaatttgtccagcttcctgtgaaatctgctccacaaaggagataggaagtagacggggaaggatttttctgctataaggaacgccgaatatgaacatcggtgttttgaatagcgggggtgactcccccgggttgaatgcagttattgaaggtgttgtgggcgcggcttcccgtcgcggctggaacgttgtgggtttttacgacggttttgaagggcttttgtccgaggaaggggacgaacggtttgaatggatgacccctgccgcctgccgcggattgcgagccaaggggggcaccattctgggaaccgtgaacaaaggcaacttcgccatcaaagtaggcgtggaccaaaagggggcgattgaacccgcggtgctggaaaaaacgaaggctactgtccgccggctggggctggatgccctgatcgttgtgggcggagacggatcccagtccacggctcttttgctttccgagatagggctccccgtagttggcgtgccaaaaaccattgataatgacctgggcgcgaccgatgtcacttttggtttctacagcgccgtttccattgtttccgagtctttggaccgtctggaaaccaccgcgaacgcgcaccagcgcatgatggtggtggaagtgatgggacggcatgcgggatggattgccttggaaggcggaatcgcagggagtgctgatgttattcttctgccggaaattcctttttcccttgaaaacgtggtggaatgcatcaaggtgcgcaaggctgccgggcagcgggaaatcctggtggtggtatctgaaggggcccgtctggcggacgaactggtattgctggatgaaaagacccagggggaagttcgcctgggaggcatcggcaaggtgattgccaagaaactggaagaagccactgggattgaaacccgctcctgcgtgctgggccatatccagcgtggcggttctccctgttcctatgaccggattctgggaacgcggttcggcagttatgccgtggaactggtggaaaagcgccagttcagctgcatggttgctctccgtgggacgcagatgactgccgtacccattgaggaagctgtgaaaaccttgaagctggtggatcccgattgccaactggtgcgcacggcccgcgatttgggcgtatgcttcggggactgacgttctccgtctgcgtcaggggaaattgattgtacccgatagggttttgattgcctttcaaccgtatcctggaatcaggatacggttattttttgcggaagcacgccgtattcattggggcctggcgagcttttaagaagcatcatggacaggaagaggatggaaagcagatccatcaggctggacaccattcccaggtagtccagatagggggccatgtcctccgggaccaggcgcagcaggaaaatcagcaggaaagtgacgatgaaaataagaatgggaatcaggatgaattttccgctcagattgctgtcatgcaggcggcgcacggcgaccggcagattgaagaggatattgagccccgccacggctgccagaagctccagggaaagcatgctcagctctccggattggtagaaaaagtaaaaggtgggattgaagcaggagtgagccagcaggatcagagcatcttgcggatgggcggcatataacaggatttggagggaaggagagacataaaaacccgccggctggctgtcaacgtctatcatgctgtagcccagcggaaggaacaggaggacggaaaggaggaaaaaggaccagaattccgtccgggacgcgcggcctgccaccgtattcaatttccgcaggctgatgagccagtaaaggtaaaacggagtcaatggctgctctttcagttctccggcagggggatcagccggttggggctccggacggcggctgtatttgttgccgtccgccttgctttctcctagcgtcagataaaaaaagatcagatgccccagcccgaagggaatgaaaagggaaaaaagccagaggccgctcctgcctgtatcatgcaggcgtctgaacgcggctgatatgcttgggatgaataacaccgcccacaggaggatggttaaggcgtctccgtagatgctcagtcttgtatcagggatgtgcagccagtccgtcaggatataccccgccagggctggaatcagcgccaggaggggaagagccatgaaccaccagaatcccgcacgggaagcgcagccccgaaagtccgcataatgaagaaaaccttttttccagcaggagaggggggaaaggagggaagatgcctgcgtggaggttggaggaacggaggaaacagcaggagaagcaggagattccggcatggatgaaaagggggtttccgtttagactccctgatgccggggaatgctcaatgcgtctgtgcccaggacatggaaagttccctcctgcagccggttcagatcaggacaatcgccatcagcagcattccggcgatgatgcccatgatggaaatgtgatggtgtccccagcgttccgccatgggcagcagctcgtcaaaggagatgaagaccatgattcccgcgacggaggcaaagagaaccgcaagtacggtaggtgtgaggaagtggaacaggaagaacatggcgatggccgcgcccaccggttccgccagaccggagagaaaggaataaaagagggcctttttacggctgcccgtaccgtagtaaagaggtaccgccacggcgattccttccggaatgttatggacggctacggccagggcgatggaggtgcccaaagtcagggagtccaacccagcggcaaaggtggcgattccttccgggaaattgtggatgccgatggccagggcgaacagaatgccggaccttttaattcgggatgaggaaaattcaccgctggcctgtccatggatgtcttccgggccgcgcgcttcgtgcgggttttcgtcttccggaaccaggtaatcaatcagagccgccacggcaattcccccgaagaaggaagcaatggcgatccaggaacctgccgtatggccttcgaactctatcaacctgtgctgggcttctcccagcagttccaccagggagatatacaccatgactccgccggataatcccagggcaaaagtaagtgcctttgtatccgtccttttcatgaagaaggcgatgaagcctcctatgccggtagcaagaccagccagcgtggtgagcaggaagacaacgaggatgtgatcggcggaaaggtccatgcgtgcacctgccgggcagggatgaccccggcagtaaagaaaggggtgtattattttgcgggagccgtgggaacgatcatcttcgtggcccggatggcgccggggggaagggggggctcttcccccggcttcaggaggccccgttccttcttgatttcaggcagcttgtccagaagtttgctgaaagcttttccttcaaaactttctgggaggagcgcaacgccttctttgagaggctgttccaattcattgaccctgttttgctgcatgagcaggtacactttttgcatgagaacagcttgtttgacttccggaagaagcccgttctttttcaagtagctgtccatgatggaaagcgcttcatcaggattttgatccgccagaatgtggatgtttttcttccggaacgtatcggcccattccaatttctgggcatggagcagatcgtccctgtgcagtttggcgagaattccggaagcgtccttcgggtccagtttttccagttctgccagagccggcttatagaaagtgcggatgctggattggggaaccgttttcagcaattgaaccagcgtgtcccgccgctgctggtcagtgagcttttccgccagcttgtttgtcagggactgctgcgtgttgagtgcttccgccgctttttttgtatcctgcatgacctgggcaggattggcgtaacctacgacggtgtggacgggccgcccctgggcatccgcaaacaccagcgtggggaatccggtgatgccgtaggattttttataggttcccagagaagtttttgtctgcgcgtcctgctgctttttacgtgggtagtccagttccacgggaataaaggaacgggaaatggctgtctggatttcaggaagggaaagagcctgctttttctgcatgatgcaggctccgcaccagtcggaaccggtgaattccagcattactcccttattctgtgcggcggcttgctgcatggcttccgcagggctggtactccatgtttcggaggcgccggcactccaggcgaggagtatggctgcgaggggatgtatgattgttttcatggtaggaatgtcattattgcatggggggaagcggagaatgggcggggggaacccacatgtttccggaagaggagctgccggaatctccggtatgggtaggtgtttcaattttcggttttccggcgggcgggtccagatcttccaccaccactttctttttggcgggctggggcacgggggcggcagccggggccggtgagggcgccctgcggataacgggggatttgagggaagcatccgtctggttcatggccgtaatattcagcgggtcgccgtaggccagcatttcccggatgtcgtcaggaagatctccggcaggaatggaggtgcttccctgttcgtgcatgatacgcacgaattcattttccacgcgggtgatttccacattcaaataagttttgcctgaatgggatgtcttcagaatgtcgaacttgcggccgcgtgccttggctctggcgtgttggcggtagcgttcgaagtaggagcggatttctccccggatgccggctacgcgcattttctctttctcaatggatttttgcgtctcttccaggtcggaggccgtatgttcaaagatatccaaaaggctgagcagctgttccttgggagcggtcctgttccgtatttccctgagctgttcctgcttcttcagcagctgggcatgattgtcctccaaagcttcccgagcatctttgacagggtctggaagctgggaaaatttttcataaacaatatagccgacactgatgacgataagggcgaacagccccaggcagaggttccagaaaagagcgtctcccctggctttccgttcggaatcctcctgccgggcggattcttcttccgcagcgtgttccgagacgacgtccagggaggttttcagacgttttttggctgcgggggcggagttttcgtccttgtgttttcctccgttctccttcggagcgaagcgggtttcgtcttccgcaggggggagagtttcgccggacggctgtctgggagcgggggcgtcggtcatgggatgcgcgggaatggaggttagtctaccgggtgggtttgtttgaattcagccagtttggccgcatacgcgttatattgatattgcagggcatggaattcctgcttgcgctgcgccagcgttttgcgcatgtcttcaatgtcaaagcacaggtgctcgaagtcgcggcgtttggaaggcaggacatctatatccttcaccgtgaagggcgtcgtgattcttcccgggttggaaagccttttctgaagattgtaattaacgcgggcgtcgtgggattccgcctggcttatttcctgttccgtctgggccagtgcgtttttcatttgctggagctgggcctggagctgctggtgttcctgggatgaattccccgtcaggaaggaggtcagggcttcattcgtactgctgtcgcacgaagtaagggccagcgtgagggccaatgccggacaggtacgcctggtgaatctcacgatgttgaacatgccggggattatgaaccttaacggaggggaaagtcaaactgttcatgcgccctccggaacaatgatttttctcgcataaaacgcgtatgcggctacaatgcccgcggcatgatgcaattatcggagatcggaggccatctgacggccagaacgggtattgatgatttgatggaggatttgttcaaggccctccattcgggagacgccggcctgtgccagttgaacggcgggagccccgccgttattcctgaggtgacggaactttggcggcgcagcatgggggaactggtgcgaaatggcaaatttgacgtgctggtgggccattatgcccatccgggcggggatcctgcctttatccgtgccctggtgcgttttctcaatgaacgttgcggatggaacctgacgccggaaaatgtggcgattactcagggcggccagatggcctgctttacactgttcaacatgctggcgggcccgtgcccggacggtgctgtgcgtgaaatcctttttcccctgtgcccggattatgtgggataccagtcccaatccctgtgtggcggcgtcatgttccggggcatccggcccggcatccgcatgctggacgggcacacgttcaagtacgtgattgattttgaccgtctggacatacgtccggaaacggccgccgtctgcatgtcccggcctacgaatcccaccgggaacgtggtgacggatgaggaattggggcttctgcgggaaatgacttcccgcgccggggttcccctgatgattgacaatgcttacgggcctccgttgcccaatatttgttttgtgcccgtaaccccggcctgggatgagaacatgatcctgaccatgagcctgtccaagatcgggttgcccggaacgcgcaccggcattgtcattgcgcgcccggatatcattcgtgccgtcgtgagcatggtgaccacgtcatccctgtgcccgaacaatctgggccaggctctggtgacgccctatctggaagacggcactctggagagagtctgccgtgaaaccctcacgccgttttaccgtggccgggcggaattcgccctgtccctgctgccggaacttttcggagaatccatcccctggcgcgttcataagagtgagggcgccatgttcctgtggttgtggtttgagggattgcccatcacgtgccaggagctttacgaacggtgcaagtcacggggctgttttgtaaatcccggccatcactttttcttcgcccttccggaggagggggaaccctggccgcaccgtcatgaatgcatccgcatcagcttcacccagacggaggaactcctgcgcaaggggctttccatcgtggcggatgaagtgcgcaaggcctactcccgttcttaatccaaacctgacccgtatccatgaacagcatgaccggtttcggcagagacgccgcccagacagaccgttataatatccttgttgaaatatcaggcgtaaaccgcaaacaaacggaaatcgccgtcaatgtgccgcgcggctatgcggaatgggacgcctccgtgcgttccatcgtgcagggggctgtttcccgcggtcgtgtaggcgtctccatttctgtggagcgtctggaggaagcggatggctccctccagcttgatgaacagaaactggcctccctggcgaagctgctgaaccgtgcgtctgacctgacaggtcaaccgttgcccctccaggcgtccgacctgctgaggctggatatcgttacttccgcagcggaagcatccctttctccggaagaagcgtggccgatggtggaaaaggcgctcaaagccgccttgaaggattttatttccatgcgtgcggcggaaggcgccaacctgaaagcggacgttcttggcaagctggatgtcttagagcaattccgcctccgtatcgcggaacatgccccttccgtgcctgtcaggcttcgggaggccatgctcaagcgcttggctgatgccgacttgtccgtttccgcggacgatgaacgcatcatccgggaagtggccctgtttgcggacaagtgcgatatttccgaggaaattacccgtctctcctcccattttgaccagttccgcaccttgtgcggttccttcgctcccgcgggcaggcctctggatttcctttgccaggaaatcttccgggaattcaacaccatcggctccaaggcgaacgattccacgctggcccatctggttgtggctgccaagacggagctggagaaaatcagggaacaggttcagaacatcgaatgacagccatgaaacagccattgggaacattgctggtggtatccgggccttccggttccgggaagacgacgttgtgccgccgcgcgacggaaaacggtctgtgtgtgtacagcatttcctgcacgacgcgccagcccagacccggggaagtcaatggagtagattaccatttcctgactcccgccgaatttgacgccagggtggagcggggagactttctagaatatgcggaggtgcacggcaaccgctacggtacgctgaaagcggatattttgactcttctggaacaggggaaaaacgtggtgatggatattgacgtgcagggggctgggcaagtccgttcctgccgggagggcattctacccctctgctatgcggacgtttacatttatgtgccgcaggcggagcttaaaaaccgcctttgcggacggcagacggatggcgctgaaaccattgccctgcgtcttcgcaatgcggaacaggaagacgcctgcctgccgcagtaccagtactgcctggtttcctccgaccgcgagacggattatgcttccttttgcgccctgctcaaatgccagtccatgagggtgggactgatgcggtgataaggtcttgcctgtttatcgagagactgcgttctcacgtttcgtcctccgtcgcatggcatccgggatggcggctccggttccgagacatttggaattggttctcttcccgtgcctatatgatatgtgattccctttcctctgatccggcctgcgtgaaaaaacgcgggttgaaattcttgacgggcaggatactcataggctctttgaataattcaatgttgaaatgatcctccaggcaaaggtgtcccggtaggtcagatactgccccgtttccttgtatccgttaattgcctttttgactaaaatgtttgactgtcagttgaacgtggatggatgaaactactgctttccgatgctcttttcttaaggagaaggataatgtaaaagaagagccctgcttttagacgaaacagggatattgttttttgttcccgtgggaatgatggcgcctttgaccgggtgcttggtttccttgccgttgaccgggccttccaaagctattatcgctctacttgagcggatacaaccagccgatggcgcaggtaaaaatgacccagaggagcaggttgagggggagtcccactttgacgaagtccttaaatttgtaaccgcccgcattgtacacgtaagtgttggtctggtagccgatgggggtggagaagctggcgctggcgccgaacatgacagccagaatgaagggaatggggttggcgtcgaattgcagggccatttcataagccagaggccccatgacggccgctacggcattgttggagatcatctccgtcaggatagagcagatcaggtacaggccggagatggcgaccaggcaccccaacgggcctatattatccactacgccgaaagcaatggctttggcaagcccggttttgctcatggcttctcccacgcacagcattcccagaatcagaaaaataatgccccagtccaccgcctggtaggcttccttcggcttgatgcagccggagatgatgacgatgagagctccgatgtaggcgagatagaagggattgaagcgcgcgaagaatttgaagaattccccgtattgctcaaaggagcccagcaggccgataaaaatgaacagccccatggccaggatggcccagccctgtttgctgcggttgtgcgcttccgcaggacgctggctcagggggatgatgcgctgcttggtcaggatgcggttcattccttcctgcggtccttccagaagaagcgtgtcccctgccgccagcttggtgttcggccccatgtccgtgatgtttttgccctgcctgtggatggcgagcacgaagatgttgaatctctggcgcagcttgagttcggacagggacagcccggcgaattcggaattgttggcgatcatgccttccacgatttgcacatcgcgctgctccagcgtttccagcccgcggctgtcatcccagcccaggtccacgcctttggcttccctcacctggttgacttttctggcgttgcacaggaaaagaatgcggtctccttcttccaggttgatgtgctgcagctcttcctgcatggagaatcccctgcggcgaacttccacgattttggtgcccagcaactcggtttgcatcaggttgatgggagtggtgccgatgtggggggaatccgcgggaattctgacctggagcaggaaatcgcgctggatgccgcccggaagcatggtggacaaagtggggcgggatggaagccatttgcggcctaatgtccagaggtagagcaggcccgccgccgcataaatcaggcccatgggcgttaccgtgaacatctggatgccgtcataacccagtttctgcacctggccgagcacaactacgttggtggatgttccgaccacggagcaggtgcctcccagaatggtggcgtaggagagggggatgagcagcttggaggccgcgatgttatgatccctgcagaaggccagcacgatgggcatcaggatgacgaccaccggggtgttgttgacgaagggggaaaccatgaacgctcccagtgtaatgaccagcagggcggtcagttccctccccttggctaccttgttgaacagtttggaaaggtctcctattaatcccgttctttccagggaagcactcagaatgaacatgcacaccactgtcagcggtccgctgttggcaaagctggacagcacatcacgcgtgctcagaattcccgtgagcatgaggacggcggtgcctgtcagggctgtgatttccacgggcatccattccttgatgaagctgatgaataacaggaccagcagaatgcctacaatccattgctgggcggccgctgattccagccagcctatgacggaggcggagttgatgttgagaagaggaagcatggtttgaaagttgaaggtgtggggaaagggtccaactctcctactttcccggcttctatctgtcaagccgcaataattttccggaaagggtttgaaaaggttcctgcgcttttttattgttggtgcgccgcatggattcccccataataacaaggtttgctcccagccctacaggcaatctccatctggggcacgtcctggctgcgtgggaagcccgttccctggcgaaccgtttttccgggaagtgcgtgctgaggatggaagatatcgaccagacgcggtgccgtccggagtttgttcagggcatattgaaagatttggagtggctgggcatccgctttgacggtcccatgatggttcagtcttcacgcttcagcgcttatgaacacgctcttcagacgctgaaggaccggggcgtgctgtacccctgtttctgtacgcgccgggagattgcggaggaggtggccgccatgggtggggcgccgcaggggggctgcgtggacgtatatccgggaacttgccggctgcttgacaaggggcgcaggaaagagcttctcaaatccggcaaacctttttcctggcggctggattgccgtgctgcggcgcggattaccggtcccctgctatggagggacatgcggttcggagatcaggtctgtcgtccggaagaactgggggatgtgattctgggccgcaaggactgcgccgccagctaccatattgccgtggttgtggacgacgccgcccagggagttacccatgtaagccgtggtgaggatttattccctgtgacgggcatccaccggacgctccaggccctgttggggcttcctgttccgcagtggtatcatcaccggctggtgaaggatgcttccggcaagcggcttgccaagagggacaggagcctgagccttcaggaaatgcgtgccgccgggatgcggccggaagacgtgttccggctgatgcgggagagctgagggattttcattcccttataggcgggggtgcgttgttccgccgggaaaggcaggggtcaggctgtggcttgcgtttttccagcagccggtcggatggttttctttccgatgcagagcaggcatgcataagccgccgccagggtcagcaggagaagggagctcaggatggccagcagattcagatgccccagcgggatgagccatgcgtgcggcatggctgccgttcctgccagtatctggggaagccagatgaaaaccgcctgggaaaacaggctgacggctgtgaaggccagccccgcggccagggtgagccataccgacggaagtactggcaggaatgtttcatggatgttttttttcatggcccgtgccgttcctgcgaatatggaaatgagaaacaggggggccagcaatgcggcggcagggagggtgtcccaaaggagccatgtgcagaggggggagacggccgtcaggaggcccgcgctcttaatcaggaggccccggggcggcggggctggtgccgcggcgtggttcatatatccgttaatcgggccagacattgccgggcgtgcttccctgggtaatgacgacttcctggcctattttcagggtgaagtttggcgttacttcctgctgtacttccacaagttcgttcgtatccttgagcttgacgcgcacgcggatcattttgacggcttccaccctgccgtccacgatggagcctgtggcggaagccagttttgaggtccccatgccgatgatgccgggagtcatggcctccgccgccgttccggccatgttggcaaaagtgccgtcgtccgtggaggtaaggacgttgatttccttgatgcggaccacgttgcccagcttgatggtcgtcactttgccggtggcgatttccagattgcttttttgggtgcaggagaaaaggactgggagaataagaaaagcgggaatgaatggaagcggattcatgatgaacgtagttaactacgctggcggggttaagcgtttttcagcgtgtgggaagaattgtgtaggtagccagatacaggagcaaatggagggaggagagtgccagtaccctgttcatgcggctgtccgcgggcgttttgcggattaggagcatcagatacccgccgaagaggatggagggtatccacatccaccacgtgtgggacaggttcaggtgaagggcccggctggatgtgggcagcgtgatgtaggcagccaggatgaaagactgggccatggcgcgcgcctttccttcccccagccgcacggccagcgtgcgcttgcccgtagtgaggtcttcctttctgtcgcggatattgttgacggatatcatgacggcgcacaggaggccgcattgaatgcctgttacgatgccggcattgtacaccgcaagcgattccaccagcgtgccgggtacgacgggcgccgtgcctatctgcaccagaatggttcccagtacggcaaccagtccgaagaagaggatgacgaatatttcccccaggcccttgtaggccagcggccacggccctcccgtatagccataggtgaagtagagggacgggatgccgatggcgaggatgggccagccgcgcagttcgataaggggaaaggccagaaggcacgctcccagcaggaagaagaggccgatgagcatgactgttctgtgggagagggctccgctggccgtcatgcgcacgggcccggttcgccgttccgtatcggcgtgcttggcatggtcaatggcgtcattgaaaaaattgcaggcaatctggaggcacaggcaggaagtcagtgtcaggagggccagggacgcattccagctgccggtcagtttctgcaccaccatgcagcctgcccataccggaatcagggaggcggtgagcgtcttggggcgtgccgccagaaaggcggaagtaatgatattcatgtgagggaaggctccgtaatcagcggaggatggggccgaggcggcggagggtttccttaatgagtgagacgtgccattgcccgggggccgtttcctcttctcccaggtagccatataccaggcaggaacccagttgagagtaaagcaggcgggagacgggtcccatgggccccattcccatgacggcgatcggccccttgggcttggtgaaaagctgtactcctgtctggatgtccgaggccaggcagggcgtgaatgcaaatttgacgatatccgccttgtaggagcgcgcctttttttcctgttcgcgcaggtaatccacacccggagtgatttggaaatcatgggtggagccgatgatgatgacgtcccgctcccgcgcttccataaccagttccctggcgtggcgcatggccttgatttcaatgtccatggcggcggcatacggcatataggcccggagcagggcaaagcgctcttcttccgggatgcggcgcagccctccttcctcatggcagcgcacggtgaccagcaggggcatctccggccggaactccataacctgttcagtcgtgagttccgggggaagggcatccacgcgcagttctactagatcgcactggtctgttaaatcttttcctttcagcgttttccatagctcccacgaggtaacggacgcaacgattttcggcggataggcctgatgttcacgtacaatctgctgcatacatcctactatcccagcaaaggaaggaaggtcaatcttctattgatgagttccacttcattttggggccgagtatgtcagttcgcctgccttttccccttttggaactgtgtttttcttcctgtgccagccctgttggccggtttcccggcagacggattgacggatgttggcgccggctgccgttcaagatgccggcagggctgtttcgtatggtccgtttccttgttgtggcggagggcgttattttcctgcctctgcacgttaaaaacatgttgagaatggaggtccggcttgaaaagggagttcggagggagctaggtgaaggccatgaatatgctttggtcaaggttattgcggatggggaggaatcccttttgggcggctttggatgccgtgctggtggtaaggacggaaaaagattcgtccgggcatccggaatggtcctggaaggcgtatgtccctcatggcgttccggttcatgaattgcctccggtgcccgttcctcttccggaaggggattgggataaggagcggtttcgtaaggaaagacggaaagctgcccgggtgttgggtcaccagaccgctttaacgctggcttcttccctccatttctcccgtttcatgattgtggaggaagagtgccgtttcaggctgccggtaataggttccacggcgcggatgcttgggcagctgctgaaaggctgccgggaaagaactgctctgtttttaagtgagccgcgtttgtctccccatacggcctgctccgtggcgaaaggagaaaaatccatcctgctgcgcgtgacggatatggcggcatcagctgcgtatgtgatggacctttccttatgtgaacgcattcttttatctcttccgtcagatcagcgggtctggccatggctgaggtattatggttctctggaggaatggtttgcccggtatctgggacgttatggtgatttatatgctctttcccctgcgttcgtttcctgcggagagggcgctcccatgccctccctctgcaaatccctgggccatttcaataatgcacgcaccaaatatacggatctgtcttatctggtgaatccggcggtcaattcatggcgttggctgaaaaacgtgaacattttttccggcagaaaaaggcttgggtgagaaccccgggatgcgttttgctccggcttcgccggattaccgtttgcgggggatgaacgcctgcatggctggggctgccgccttacggcagagcttgaaataaggtgttccgtgcgcccgtcatctcaaaagcaaaaccccggaccgcaggcggtccggggcggctccctttttccggagggaggatgccgtgatattagaggggttagctggctccttcgtcgcacaggatcttgacaaagccttcctcctggaggcgggtggcgccgcaggcgaacttggcccggatttgcagggcttcctccatatcgtcgcgcacggaaagcttcactttgaaatcattccatatgccaaactgggccttgctctttacccaggccaggcaggaacggactccctcttctgttttgggaagcctctgggtgcggatgaatttgaatcccatgaaggtgtctattttcccttccaccagggcttttacattgttgaagtcataactgctgacctccgtttcccgcagcaggttcatgatctgggaactggttaccgcaatgacgagctggtctccgaactgcggggcatcctggttccaggcttcgttttcctcaaaaagctggagggctgcgcgcagcttggccacggtaaggttgctggcggatttggtgccgctgtccacgtgatccacggctatttgctggctttccttgaatggaacggcggtcatgccgtcttctcccacgtagttcgtatccaggaagccggagatcatcacgtcgtccatgcggcggcctgctgcggcctggagaccttcaatcgtcttgctgacgggaaggtccatgtctcccaggcgggtggcgtcaaattcatcgtagccaatggctttggtgaacgtgcgcggccgcatggaccggcgtgtggtgggagcctcgttcaaaacggtctgccccacccgtgtggttttttccgtgaagtccagaatgccgaattgatccagaaatactaccttgccgctcaagtcgcgcatgacgctgacatacttgtccagccgggaggcgtgctgctggagcagggagccccattttctggtgtattttacctgataattatcgctgatagttactgccatgattgcaaatataatgatagtttgaatgcaggaacggcaatttggattatcgggtccggaataaccggagcggtcctgccgcaagcgggatgcggctatgtcccctgcgggattgcgggccggtcccatccagcgctaacgtgtatggactacaagacagaaaagcgcaccacggcagaatcgtgatgcgctgtataaggaatgaaagacttcgccttcccgctgttaaagaataatcgcgtgcgtccgcgtagcgtgatccgggccgaaaagggccagcatgcggcccgtttgccctttttccatgcggtaggagtaaaaacgtttggtatcctccgccgtgtccagcccggaatcatgaatctgttcttccggtacccccgcttcaatgagctgtgccttaatggccgtaggaatgtcttcctcataatgaggcgggcggatacagggggaaatgacggcaatcaggttggacggttccaccccaaggcattttttcatggacttgatggtgttggaaacgatgttgccggcggttcccgccttgcctgaatgaatcagggaacggtggcagttttccttgtcgtacaaccacacggcggcgcagtccgccacgtaaatggcaagcacgcagtcggaaactccggagcaaatcaggccgtccacgccttccacaggataattggagccgatgtcccccaccagggcaactttcgtgccgtgcacctgttcggcgcggcgcaggtctttccaccgccagcccagggcttccacttccgccttatggtacggttccagccgttccagcacggtttcgcggtctccggtgacgtctactcccggaattctctcaatgaattggacgatttctccgggataggactggataggcttcaagaatgctggcgtttccataattgatggatcaataaatgtcgttggggacatcttgtcgttttgtattacctagtcgagcaaaatttggcgtaaaatgtcacggacgccgcccggtgactgagaaaaggtttttttccgcctttctggagtgatatgagcaattcatgctgtgcaggtattctttactttccactttttttgcgggaatggccgccgtgtttttttcctttgctgcctccttggcccaggaggcttctccggatgccgggcagctgctgaaaagggtgcgccagggggcaactcttcaggaaaacaaggacattaaggggcaaatacgcaaacgcagcgtcaaaattcccttttccatgagtctgcgcggcaatctgatagccttccagtaccagctcaataatgtctggaacaggttcgatctgaaattcaaggaccgcggccaggagatcctttcctggaaggacgggaaagccggtgttttgccggttgcccagtatgcggtgcccattgcggggacggacgtaacgtacgaagatctttccatgcgctacctgtactggccccaggcaaaaattgtccgggatgatgcggcgagcaccgtcaaggggcgggattgctggattgtccagataccgaatcctaattccggggtggggcaatatgcctgggtgcgcgtctggattgataaggagaacggcgccatgtggcaggtggatggcattgaccgccgcggggagctggctaaaaggttcatgattgattccgtgatgaaattgaaggacggatcctggtttttcaaacggatgaaggtggaggtccgggatccttctaatccgcgcagaacggtctccgtcagctacatagatatggacagcccggaatagccttccggttcccgttccattccccgcggagctttcggattattctttccggggcatgggggcggattccttttcatgccgcacggatggatgatttaggacgtgacaagaaggcgggatgggcgtaaatcctccaaaaacctgttatgaagaaacatttattccttgcatgtgccctggcgttcggcatgtccgcctgttcccagcaccaggagcagccggcggagtccggttctccggtgaaaacgaccatttctcccgtgactgctcctgggaaaaagccggaccggccggccgtgaaattgcctcccaagtccgttccggtgccttccgtaagcccgtcctataataatactcctctttccccgcgcattccgggggtaacggtcaaccgtgtggctgtgccggacaaggtggtggccctcacctttgatgacggtccccatggaacgctgacccccagggtgctggacatcctgcgcgacaataacgtcaagggtactttcttcatgcagggctgcaatgtgaaggctcatccccaggtagtgcgccgcatggtcaatgaggggcatgaagtaggcaaccatacatggaatcacgtttatctgagcaaagtgccccgcgaaaaagcggaatcccagctccagagcactaatgaagccatccgcaacgcctgcggcgttgtccccgtggtcatgcgcccccccggcggctatacgaatgcaggcgtggcgtcctgggcccgccagcgcttcggcttcaccacggtcatgtgggatgtggacacgaatgactggcgcaagcccggctcctccgtggtggccgcccgcgccgtgaacggcgccaaacccggctccatcattctggtgcatgacattcatgcttctacggtggcggcggtggacgccattgtgaagggattgaaaaaccgcggctatgaactggtgaccgtttccgaacttatcaggagaggacgtgccgccgccggccatgctccttccatgcccgcggctcctgctgttccggattcttctcctcttgccgttccctcgattgtggctcccgcggagcctgttcccgctccggcggagacggtggccggcatgtaatccccggtgtttttccttttcctttcaacccggtttccctgcggaaaccgggttattcattgcctttccggagcatttttcccaccgccccggaaaggaggctttccccttaacgggcacacgcacagaaggcttgacctgctggtgaatttctccacaatcctttgccgtattattcacacccaatccggattgaaatgtctatgaatctcctggcatctgccgatactctacccgcacctggcggaatgtccgctcctctcgccttcatctacgatctcttcaataaccctcttttcatcttcattggcggtctggtgttgctgggtgtgtttttctggtacctgggttccgaccaggacaaggtcaagcgcaatgccggaacgattttcattatcggcattgcgtctttttccctgttctccctcttccagcaggggttgaaatacggcattgacattgccgggggcgtctccttcacgttgagcgtggaaccgaatatcggagacgacggcaagcccattcccctgacggaccaggccatggaacaggcatgcgtgattctgacggaccgccttaacagtaccggggccaatgacgtcattatccgcccgaagaaaaaagacaacctgaatcttatagaagttcaaatccccgctgcggatcctgccaagcgcgaggaaaccaaggccatcctgaccaaagtagccaagcttcagattcttcctgtccacccgcgcaacaacgaactggtggcggaggggcgcattcgcgttcccggctacaggatgtatgaatataccttcaaaaacggcaagggtgaggacgtcacggaaaaaatattcctggaaaagcgtgaatcgctgacaggcagggatatcgtgcgcgccggagtggatctggcccgtcccggccacgtcaacgtcaccctgagcaacgaaggggcggacaagatgtataacctgacttcccgcatgcagctgggccacgaccgcatggccattgtgctggatgatgtggtcaagagcgccccaacggtccaggccattctgtcgaaaagttttgaaatcagcggtctggatgctcccggagaggctgaagccctgacgaaggtgctttccaacccccttaccaacaagctcaattttgagtccgccagtgaaatttccgcctctttggggcatacggccctccttcagggggaatacgctggcattacgggattgatcctctgcttcatcatgatgatcatctactaccgctttgccggtttggtggctatcatgggtctgacgatcaatgccctgcttcttctgggagccatgtctatcttcgggtttgagctaacgctgccgggtattgccggtattgtgctgactctgggcgtggcggtggactcgaacgtgttgatttatgaacgcctgcgggaagaaaaggaaatggggcgccccttccgcgtggctatccgcaactcctttgacaaggcgttctccgccatctttgactccaatatcacctcgctcattaccgccgtcatcctgtactggatggcaaccggcaccatcaaggggtttgccgtcacgttgacagtaggcgtcatcacttccatgattggggcgattctcgttacccgcgtcctgttctactgggcggataccgtcggcatgatgaaggatcttaaattcctcaacctcttcaagaaaaagacgaacatcgacttcatgagccagaaaatctggtcctgctctctttccgccattctgctgatgatatgcattgtatttggcgccgtaaagggcaaggattgcctgggcatggactttacgggcggttcttccatttcctatctggtgaacaagggtgacatctccttccgggaagtggaaggcgtggtcaacaagctgtccctgacccagaaggctacggtgcaggaggtggcggagtccacggacagcagcaaagtgaatattctgattaatttctccgaccatgcccaggacaaggaggctatcaccacggcattggacaaggcgtttccggttctggacaacgctccgttcagtgaagaaaccatcgggcagtccatggggtacgatacgctcattacttccgcatgggcccttttcttcggcattctgggaatcatggtttacctgacggtgcggtttgaatggaccttcgccattggtgcggtcatcgccctgacgcatgacgtcctgctggtgcttggcctggtgattgtcagcggaacggagctgaatgttattcatattggcgcgttgttgacggtggcggggtactccatcaatgacaaaattatcgtatttgaccgcatccgcgaattcctccgcttctccgacccgaatgaaagcgcttcacaaatcatgaacgaagccattaaccagacgctttcccgtactattttgacctctctttccacgctggccgtgctggtgtgcctgtacttctttggaggtccttccatggaagacttcgcctggacgatttccgcaggcattttgattggtacgtactcctccatcttcatcgcttctccggcggctcttttcttctcccggaagcatgggttgcatgaagaagtcagacaggccatgaaggccggagcctgaggtttggcgttgagccgttaaatctctgaccggggaaggctgaatgccttccccggtctgtttcttggaaagagagggaaaggctctgtatggaataacctccgtgttcttttcccgtccgcctctttcgcttttcctgtttccaccatatgcggctacggcttccgcatggctcttctgtctcgcattcctccctcttttatttcaggcataagaaaaccccgcctgccgttaggcaggcggggccgtatctctggtttcctgctatgtatttctgcgggtgagattattcatcatccccttcctcctgtgccggggcgggagggggaggcatgtcgttgttgccgcgggctgcctttctggcttccctgcgcgcttcaagagccttggaagcgtcagcgttgagctgggccatttcagcctcattcaattttccgtccttgtcggcgtcatacttttcttcaatcaggatccatccggcagccatgatcggggcgcggttggggtcaagctggggacggggaccgttagggcggttgccgtgggggccccggttaccgtcttcacggcgtccttcaccgcctctgcggccttccggtcctctgggagcgcgggggccttcagctctggggcctcccggacgcctcggaccgtccatgttgggcattctcggtcctttggggccaccgggaacggcatggtgcgggccgggctggccgtgatgagggggaatggactgcaattcttccggggagagcttcccgtcgccgtctttgtcaaattttttgatcatggcggcggcgtgggcttcctggcgggctttcatttcttccatgcgcttggcagcttccggatggttttttgcccaatcttcccgcatggctttcttttcctcgtcggaaagcttgccatcgccatccttatcgtacttcttaagaatttcggctttcctggcttcctggcgggctttcatttcttccatgcgtttggcagcttccggatggtccttaagccattcttcctgcatagcctttctttcctccttggaaagcttgccgtccccatccttgtcaaatttcttcaggatggcggctttcttggcttcctgggccttcttgacgtcggcttgcagaacggctatttcctcgtcggaaagctttccgtccttgtcggtatcgtatttggccaataccagttcttctccgacaatcatgataccgggatcgattctcttcatctgaacccgttttggcccctggcggtctctgcctccggcatggtggcgatgacctccccttctttcaggggggggctgcatttcaggagcatcggaaggagcctccggagcgggaggcggcggagcgtcctgggcgaacgcggaacatgcggcgaaagccgcggcgataatcatttgcttggtcatatctttgaatggtgaggtttgatgcgtttcggaaaggagcgtgcgctgcggtgtttcaaacaggcggaaacgtctccctttgctaaaaggaacccctggaattcattccggttgcaaaataaaaaggcaaatgcgtcggagagggggtgcgccgctgtttttatgacacctgttttcttccggggtaaagaagggtgaacccattgaatatgaaggaaatcagtgagggaatacagcaatcgggtgcgagtgcgtgccgtccgtgtcatagcggaaaaaattattcgccggaaataaagcggatgtaggcctgccaccactggctgccgcccagcagccagatcagagcggcgctgagaagagcggggccaaaggggaggtttctgccgaaccccatgcgtgaggcggcagcctgtacaatccccagcagggagccgaggaaaaggctgaacagggcgccctgccagccgcacgcgcatccggccatcatcagaatccaggcgtcgcctgatcccatggcttccctgctggcatggatatccgtcagatttccctccacgctttccagtctttccagaagaaaaacgtccccgttttccatctctatcctgtcgtaccgcagcgtgacggagcaggcagggtgcgttttgccgtcaatggtgacggaacctccggaaaggacggccttgtccgtagaccggtggaaaagcatggaccagtcgtgaggctggccgttgacgatgagctgaagttcctcccgctcggattccggttccctcaaactccacggggcgggaacgtcaaaatgctgtttccaggtgccgaacagaagcttccccaattcaatcaccagtctgatgaccgcataccctgccgctcctcccagcacggatgccgtgaaggcgtccgtccaggtcatgacatggctgtccggcaggaggaaagggtaaagggcgcaggcccccgttccggccaaggcgccgataaatgcctgagagcggaagacaatcagatgttccgcgtcaatgaacatgatgacaatggccatggcagtccacaggcagagcaggacggctgctcctgtggaagcgtccgcgtatttccagccaatggccgcgaagagcagggccgtgagcagctccacaaagcaatatcggaagctgatgcgcgttccgcagcaggcggatttaccccggagagccagccagctcagaaccggaatattcaggaaccagggaatgggttttccgcattccgggcagaaggaacgcgccggatcgttgatggagacgccccgcggcatacggtagataaccacgttcaggaaggaacctatgcaggcccccatcaggccgaaaaccacgggaatcacccatgcgggaaaggcgtcaggcatgggtgggcggggaataggttcggctgggcgtctggttgatgcggtcaatcagcagcctcagcctgccgtagttgccgcgtttgatggggaagacgagccggggcaggcggtccaggtgtggttcgtccgcttcatccggcagggggccgctctggatcattttccccccaggcagaatcaggtctgaaaagtcccgttccagatgttccacccactgggcgggaagctgcgcattcagccggatgacgatggaatctccgacaaaacggtaggagtggaaaatccggtaaaaacggtcgatgtgttccatggcttccgccggatttttagtgacatggatgagatgaagatcgtctgcggaaatcagtccggaatccaccagttccacgcgaatgaaggccagccagttcagccagaaggttttgccgggggaatccagaaggacgatcgggtaaatggtcgcttttcccgtctggatcagagtgagcgtttcaaacacttcatccatggttccgaagcctccggggaatgccaccatggcgtcgctttccgccacgaagttcagttttctgacgaaaaagtaataaaaattgatgagtttgtcgctgtgggccaccacatggttggaggtctgttcatacggcagggtgatgttcaggccgaaggagcgttgctctcccgccccttcattggctgcctgcatgatgcccggtccgcctccggtaatgaccatgtagccgtgttcgctggcttccctggcgaattccctcgccgtttcatacgccggttcgtcattcctgatgcgggcggagccgaagacggaaatcttgcggatgtggcggtacggggcgaaaacgcagttggcgcggtacatctcccgcccggagcggatcaggacggtaaaatcatggtccgaggcggcggactgggccatgttgattcccgttttgatatactcttggaggtagcggggatcgtgcctggtggaggctatttcggaaagctttttaacggcgccttccagagtctggtagctggaatccatggacatggtggaggggcgtttcttgtcttcacctgtaaaatccctgttgtccaaaaaatcaggatgcttcatgagttggtatgataggtttgccctactatgccagatgacgcacattaagtcacagaaaatttaccggcgggcatgaaaagagttgattgttgaaaacagatcgttacattgctccccgcacgggcgttcccacaacatgccgttggtccttcaggcgcattggccgccatgtccgtgttgaggggaaacccggtacattacatacgattatgtcggaaaacgaaaccactactgcagaagaaaccgccgttaccacgctggcccgttttgaggttcccagccgtctggaaaaaattgaagatccgaatgatgcgaatcatttgacctttgtggcggaaccgtttgaaaacggttacggccatacgcttggcaactccctgcgccgcgttcttctgggttctcttgaaggcgccgccattacctccgtccgcatcgccggtgcgcagcatgaattttcctccctgcccggtgtggtggaagatgtgacggaaatcgtgctgaacctgaaaaaggtcaaattcaagcataacggcaaggaaccgcgcctgctctctctgcgcgtgcataagcagggcgttgtgactgctgccgatattgccgacgacaccgtttaccaggtggtcaatcccgatcaaatcatttgcactctggatcaggacaccatgttcgaatgcgaattccaggttcgcgtgggccgcggttttgccaccggcgatgaaaacaaggtgccggatatgcccatcggcgtgattccgatcgactccattttctctccggttacccgcgtgaagtattctgtgcagaatacccgtgtggggcagatgactgactacgacaagctgatccttgaagtctggacggacggccgcatcgcccccgcagacgccatgctccaggcttccgccattctgcgccaccacctggacgtattcgtcaactatgacgacaagcaggttaactttgaggaagctccttccgccgtccaggacgaggaaacggcccgcctgcgcaagttgctcaacatgagcgtcaacgaaatcgagctttccgtgcgtgccgccaactgcctcaacaatgccaatatcacgaccgttggccagcttgccatgaagagcgaaagcgaaatgctcaagtaccgcaatttcggcaaaaaatccctcaacgaaatcaaggacaaattgctggaactgggtctttccctgggcgttcaggtggatccatccctgcttaccggtcccgtgccgcaggccaagccgcgcctgggtctggaagaggaaagccccgtgggcctggcagacctgattgccgccaacatcgaagacgacgacgactaaatctcacaaaaccaacacacatagaaaaatatcatcatgagacacggtgtaaaaacctccaagcttcagcgcaacgcttctcaccgcagggctctgctcgccaaccaggcatgcagcctcatcctcaatggacgcatcaccaccaccctggccaaggccaaggccctgcgcccctatgtggaaaagctgattacgcttgccaagcgcggtgacgtgcattcccgccgcctggctaccgccaccattcataatacgaccgccgttaagcggctgtttgatgaaatcgctcctctttgcgcggaacgcaagggcggctatacccgcatcgtcaagctgggccagcgtctgactgattccgcccttgtggccatgatcgaaattatcgatctgccccgtgaggctgccgaaaaggaagaagctcccgccaccacggaagccaccgcctaagacgcacctctggaacatcctgttaatatcccgctccggccttttgtgaggccggagcggattttttattggcaataaggaagttatggcgataatatcgctcttgcttctttcctgccggaacgttataatccaactttaactatggacgcagtattattgttttccggacaaggtgcccaaaaagtaggcatgggcaaagatttgtatgaccagtatcccgtcgccaaagccctgattgaacaggcggacaaggcgcttggagaatccctttctgccgtcatgtttgaaggccccggcgaagaactgacgcgtacctgcaactgtcagcccgccctctacgtacatggccttgcctgcctggccgtcttgaaggagctcgttccctccctgaatcctgtggctgccgccggcctttccctgggggaattcacggctcatgccgctgccgggacctattcttttgaagaaggcctccgccttgtccagaagcgcggcgcgtttatggaggaagcatgcaacgccacgaaaggcactatggccgccatgatcggcggcacggatgaaaacgtcattaagctggcgcaggaatgtgacgtggatgttgccaatttcaattgccccggccagacagtcgtttccggtacggaggaaggtgtggccaaggctgtagcaggggcgaaggccgccggctgcaagattgccaagaagctcaatgtggcgggcgcctaccattcccgtctgatgcacagcgctatggtaaagctggcggaagaactcaagaatatttccttcggtacgccgtccatgcctgtttattgcaattatgaagcccgggtagtggaaggtccggacgacatccgcagcatgctggaacaccaggtatgcggatccgtgcgctggacggcttccatgcagaagctggtggaccagggccaccgccttttcattgaactggggccgggcaagacactggccggcatgatggctcgcatctgcaaggaagctacggtcatctccattgaagacgtgcccagcctggaagccgccgttgcggagctgaacaaataatttccctgaataaaagggggtaagccgccggcccgttggggagccggcggttttttgttggcgtgttcatggcggggttccgtcaaataggcaatatcccatggaacaggggaaatgcctgcctccgtgccagcggccctgctcctgcgcgggcattttcctcatgccgccggtgggaagatgcatgaacatcagcatcgttcccatgaaaaaagcgatggcgggcacgaacagcggtttccatataaggaaaagtgcgggcatgatggaatgcgccgctcctcaggtcagaagaatcagggcaatgaggtaaaacaggaggccgcttttaggaggccggcaggagagcatgaaagccgaggctctgagccgcgccaggcgttcctggcggcgcagccccctgcatcaggcatgaaaggaattccgtcaggaaacaggcgttatggaatagaaattcctgatttctaaagaagttccgtcagagagcggatgatactggtcgccagggaaaaatccgcctgctccgttaccctgtttggaaccgagatgactggcattcctgcgcggtgtgcggctgtagtgccgttctgggagtcttccagcaccaggcatccagacggagatttacccaggttttccgcggctttcaggaacagggccggatccggtttgacggggaggccgtcgtcgcggcagacgacggtttgaaaatagggcatgatgcccaatctgttcagccagccgtccacccagcggtgggaagaactggaggccactcccataggggttccggcttcccccaggttccggatgagttctccggcgccgggcaggaggccggcatgttccagatcccggacgatttcctcctggcggcggctgttgacggtttcccagtcgaaagtgcgccccgtcaatttctccagatgttctccgggattccagtgggtgtagccgctgcccaggcattggttgaacaaatccaggggaagagggtggccgcaggacgcgaaaacccgttcccaggaggaataaatggcatattccgtatccaccagcaatccgtcaaaatcaaaaatgacggcgtgtgcctgccggagcagttcacgggctttcagaacggcttcccgggaatcggcaaagtgatcaggaatggtcatggacgggagtctttttcaagcctctcaataattccgagaagcttctgtgagccagcttggtttgaaaaaggcggatggcgatgatggtgtagataatgttgggcatccatgctcccagccaggtggggaggtagcctgcggaggccagggtggggaaaaactcatacaggaacagcatggctgccgccaggaacaacgcaatgccgatgccggacatggcggagcgtctctggaacgtgatggcggaggggatggcaataaatgtcaggataatgcaggaaaatatgcgggcgatcctgacgtgccattccgtctgcaggcttctgaggtacctggcatttgtcgtgccggacttgatgagttcttggagagccggggttccctgtgtatccacgcggacgttgggtgaaatcagttgccagggtgtttcgggataatgctctttcagcgtttggtattcctgtccggcaaaaacgggaacatcatggagctggcggggttcctcctgggaataatttcttttgatggcctgccggaaggtccatgtcctggaggccggatcccaggtggcttcatcggcaaacagctcgtatttcatctttccgggggcgctgaactgttccacccgcacctgccggaaaggattgccgggggaatcaattccgggaggattgcccagataccagatgcgggattccgcatcatttttgtagatggtgctctgggaagcatggttatttttgttctggctcagggaggagaacatcagtttcctgtacagggcggagttgggtgcccagtggaacccgaagatgccgaagtagatggaggcaaagacggcaccgatgatgatgggggtgttgattcggagcagggaccgtccggactgcagcatgccggtgatttctgaggatgaggaaagtttggtaagcgcccagagtgttcccaggagaagggtataaggcagaatcaggttcaggatcatgggcagctggctcaggtaaaagcggaacgtgcccatgaggggtgcgtccaggttcatcaggtctcccacattgtccgcaaaatctccgataatgtaaatcagcgtcaggatggccgtacacatgatgaaggccgtgaaccaggtgcgcgccacatacttgtccaggatgctcgaacggttgtacaggaacattcccagcgcggggagaaagcagcccagaaggatgagccagggccgcaggagctgggaaaggggatattcggacggcgtaccgggaatttcccattgcatctgggaccattcccggggcatcagaaaccaggctgccgctcctcccagcgcaagcaggaggagaaatacggaccattggcggaaatgtcgggcctggattgccatgaaaaaagaaggtggggcaagaatgccagatcgggagcgggaaataaagcgttatttggccgccggacagggataaaaggctgcctgaaccgcatgtccgtgcttgcttcgtgaacctcagtgcggttccgctccttaaagggaggaagtggctgcgggagatgttccgcctgatagaagttgactgttgtcaacgtaaactggatgagataaaatcttcctgacaactgtttcccggcaacagcctttccatgttcaaacgtcttgttcaattgtttcttctgttttttctggctgctgcgggtgttctggcgtggtttgcttggtacgtctccactcccctgctcattcccgtgggaggggaggaccccgcctcttctcccgtcgcgggttccctggtgatggaacccgtggaagccgtttcatccgatggcacggctattgaaggttatctggtgagcccggggtgtccggaggctctgtctccgcgccagagccgcgtgcgggatactctgaaattgcgcgggaaaatgccgcatttggaggcaaaaccagagctggttgtgatagccgcctcttggaatgagggagtggaaagttccctccctctggcggaagggctggcaggagccggttacacgagcctgatatggaatccgcgcgggaagaacaatacccgtcaattctgcacgtacggattaagggaatatgcggatgtaacagcgcttttggacgccgtatcccggaagcagggcggattgcctcccgtggctgccgtggggcagggatttggtgcggccgtgctgttgaaagccgcgtctgaagatccccgcatccgctgcatggtcagcatggactgctttccttccctgaaaaccgtggctgtccgggagatggagcaggattggggcaagcctttgtgctatgccgcttattggctgctggatgccggggtggattggcgtgcggggttcagtacgtttgacgtggctcccgtggatgatgccctgaaattggattatccggtcatggtggtttgtacgaaccaatattttttctccacgctggaagattgcctgagcatttacgattccctgaaaaatgagaaaaaacagctttatgaatccatccgggaaggggaaccgtatggcacccgggaacggactttcctgcattccattgaaggaaagaagggggaaaaatttgaaaagatttataaggtcaacgtctatgcgggggatgacgagctgcaggctggcattgcggaatggattcatgagaatacgcgcatgcccatgcccagggtgttgcctcatgagtcttatagtgcgcccgttacggggaccgctccttccggttcatgaattgttcctttccttttgctgatgatcccgtgagtgcgaatcaggacaacaaccgagaactccgcgaaaaccgccgcaggcgcagccgttttattctgcccgcgcctcgccatctggcagctgtggcggcaggggctctccttgccgccgtgctggtgcattacctggggtttatcgttctgagctggtttgatctgggcattcatgtgcacaaagcccccgctgtccaggaggacagaaagcctctgcctgaaaaaatagttctgaaggcagacgaccgtcctgctccggatgtagcggaagccgttgaaaaaccggatattgagcaacttgaagagattcccccggaattgccggatttagaggatatgcttccggagcaggtagtgattgctccgggggaaaccagcttttccgcagatccggtaagtccttcccccccggaatccctttccccgaaaatgccgcaggtggacatgaatgccgtcgcgaaggggttgcccgaaccctctccgcctgagatgctgaaatcttccgccagtccggttacaatcaagacggctgaaccggatatggtgaatccggatgaatggtataacaataagctcaaaggggcgggcggtcaggatgattcccatttgccggatgggagcaaatctctttcccagctcatggcccagtcctccttgggcaaggacagcgggtacagcaggctgggagcggatcttctttttgaatacaacaaggcggtgatgaaaaattccgccaggctgagcatgctccagcttgcggggctgatgatgaaaaatccggatacgattttcattgtggaaggtcatacggacagctttggttccgaggaatataatgccgtgctttccctgatgcgtgctaatgccgtccgccagtggctgaaggataacggcatagctctgacgcgcccgaatggggaatgcagattgtacatacgcgcttgcggcgcttcccgtcccgtcgtttccatcaggggggaccgggatgcccaggccgccaaccggagggtggaaatccacatgcgcaagccgggagaggaaatacccgctgggagcctgccccttacgtatgcggtggatatgaacacccctgtcgcccgccaggtgcgtgccggagtgggcgcccgcgccggaattccctcctccgcggcagaaaggaaagcgccccccgcagggcgttcatcttctgcctccccggaacgccgggaaaatcctgcgccgcgtcaggaagtaattcctgaggcggaacccattccggaaacgattccttcggcagagcctgtggaggaacgcatcccttcggcagagccggtagaggatgacatcccgctggctgaacccgtcgtgtgtgcgggaagccgcgccgtagtgaagggaggtgccggattgagatggaattgatgcgtgtccttccggtccgggcgctgccgaaacccgaacggctccggtatcttttctcctttgattttgacgatactctgttcactcttggaggccctgcggaagaaaggagcatttttttcagaaccatgcgcatgctccggtcgcagtatggtgttctctggggcgttaatacggggcgcgaccctgtctacctgagggaaggtctggcggatatgttccgggatgatgcggaagcgtttgccccggattttacggtgacgatggaacggaatgttcatctggcagatgcggagggcaggctgatgcccggcgccgcgtggaacgatgactgcgctgttgcccatgacagcttgttcacccgttacggcggcatgctggaatcattgatgggccagctggaaagccggttttccgggctgggactccgcaggcaggacaatgacgctttttccctggtggtggatgatgcctgcggcctggatgaagtttcctgcgtcattcaggatacggttggtccgtatgaggaaattgtcacgcaaagggcaggtccctacctgcgtttcagccaccgtgattacaataagggaacatccctttcctttgttgcctcccggttcggcattccgtcttcccatgtcgccattttcggcgacgggcacaatgatctggacgccatgcggcacttgccggaggcattccggtgctgcccttccaatgcggcgcaggaagtgaaagacatggttgcccgcggccatggatacattagcccggaaccgcgcacccggggcgttctggacggcctggcgcatggagtgttcccttatttcgggatgaaggcggaggttttgaaggaggatatttgaaaacggagctttcggatgctgacgggagatcggttttcaacatgtttctttcatcaagtcgctcccggaaggggaagaatcgtattgacaaggaatgcctgcaatgcagaaatgggaaagattatttcccaatcccgattacatgaacattccctctttttcccgtagcgtttccagaggttccgccgtgggctggtttttagtgttgctgctggtttgcggtgccggagccggatattatctttaccaggataacctggcaaaaagaaaagcggcccaggaattgaccgctgaacgtaaattgaaggagaagaaggccagggaagctgcggagaaacagcgaataaaacgggaacgggaaatcagggagaagaaggaaaaggaacggctggcggcccagaaggcttatgaggaagcgcaggaagagaaggcgcggcaggcggcggaagcggcccgtaagcttcaggagcaggccgaacgcgaagaacgggaaaaaaggagaagggaggagctggaacggcgcgaacgtgaggaagaggcccgcaggcaggaggaagatattcctgtgaaagaagagcctgaaccggaagggcgttttccccaacccgtgaaaaaccggatgccggagctttccgtttattctattccttgcagggatgatatccagacggaaaaagataagccgctggaaacatggtcctgggacaaggcggaaaaaatggagggtatggaggaattccccacgggttcctctccgtggaaaaaagggaaagacgccggacgcatgcaggcgcttctggaaaaatgccgggaatggaaggatgccaaactcgcctcgctgaaggcgtgcccggcggcgcaggattttcccggcgttccggagaatggggcccagacggtcaggcggacggtggagatagattccaatattggaggctggcatagtacgggactgtatgcgccgcccggggcggaaatttcgtgttccctgtccggcgctcccaaagacggttcgatcagcgtccgcataggatgccatacggacagccttcataagctggatgaatggaaaagagtgccggaaataaccatgcaggttccggctggccgtgggcgcgtgaaaatggtgaatccgatgggcggccttgtttatgtgaatgttggccagcgtcccagacggggaaaggtcttcaaggttcagatttccggagccgtgccttcacctctgttcgtaatggggaagaccactccggaacaatgggccgaacaattggaaaataccaaggccccgtggggggaaatccgcatgccccggcttattgtcacgatgcccgtggaacagctgaaacagtgtccggatgttcagaagacggcggaatttctgcaaaaaaacatggctcttcaggactggattatgggatgggataccaagccggaccgcctgcatcatccgatgcgctttgtcgtggacaggcagatatccgccggggccgggcattccggttatcccgccatggccacgaaggactggacgaattccattgccaccggttccatcatccattccggaagctggggtttgtggcatgaactggggcataaccaccaatcccctccctttacgatggaaggccagacggaggtatcagtcaacatattctccatggtgtgtgaagtgatggggactggaaaagactttgaatcctgctggggcggcggcatggggccgtacggcatgagcgcggaaatgaaaaaatatttttcaggcacccagacttacaatgaggctcccaacaaggtgcagctcttcttctgggtggagctgatgtactatctggggtttgacgccttccgccaggtggctcttcaattccatgacaagccttatgacaacggcgaactgagtgatgaaaagaaatgggaatgggtcatgaacgctttttccaaggtcacgggaaagaacatggggcctttctttaagatttggcgtacgccggtttccgaacgcgctgcgggcagaatgaaagaccttcccgcctggcttccttccaaggattatccggcctgttataccgcagaggaataagaaggttccggaacaggagggggaggaggcgttgccgcactcgcttctggacggttccgccggctggggctaggatggcggagctgtgaaatggctgaatgactggctgggctttttcaagccccttcaggtgcggaacctgcaaatattctggtcagggcaggcttcggccctgattggaatgtggttgcaggtgacggccatgggtattcttgtgtacgatatttccggaggctccgccacggcagtgggggtgttggctgccttgaacgctcttcctttctttctgggcggcatgctgcttgccgggctgggggaccgttttgaccggaggaaactcctcatagccgtgcagtgcgtccagtggctggtggctgtagccctgtttcttctgactgtgctggatatgctccagctgtggcacttatacgccgccgggctggtgatgggcgtcaatcagacggtgggttttcccacacagcaggcttttgtgggagacctgataccgcgccggcaattacaggaggccgtgggcatgtattctctggtatttaatacgtgccgggctatagggccggcgcttgccggctacattattgcggaatggggcgccggaaccgcctttggcggcaatgtggcggcaagcctgccgctggttggctgcctggttgtcttaaagggacgcgttgcggatacctccgctcccagaaaacagcgcggcgcaggaaggaaagcatccggcctcaaggcggtgcttgccacgcgcagcctgcttttcatcatgatcagcgctctgattcagaatatctgcgggcaatctctctatcagattgttccggcattgatgcacggaaatcccaggaataccggcctcattctgggtgcggtcggagccggagccatggtgagcatcctctttgtcctgccgtttgcacgcaaaagtgacagggtgggagccaagctttcctcaggcaccctgtggatgggatgcgcactgtgcgtggcaggcgtcatcccggtggtggaagtgcaggccctctgtttcttttttgccggtttggccacttcttccctctttgttacttcttcatccgccgtgcagcttctgtcgcccccggaacgcaagtcggccattctggggctgttcagcattgtcaccatcggtgtgcagccgctggcggccatggggtggggagctgtggtggatgcctggggtgtccagatgacgattgtcgtggcgggggggctggaagccttgttttccatttggatgctgggcgttccattttggcgtcatttcaaattttctccggatgattgtccggagacgacatagcgccttcccttccatttgcggcaggggaagactgtcggtcctcatgctgcggggaaaaggggtgcgtggagggtttttcccccgcggaaattccgggatgcagccggccagggaagaggaagcaggttttggaaacgtcaggagcaggaaccggctgttagccgtccgtttctgcctcgtgttcggaatagctgatgcccagcatgcagatatcgtcggcctgattggtgcagccggtaaatttggctacgcaggtaagggcctgatggacgaaatccttggtgctgtggggggaggaattattgaaatagtcaatcagcctttccacgcccatttcttccccgtcctggttggctgcttccgtcaggccgtccgtgtacatcaggatgcgggaccccgccaggagcgaaaactgggcattatggtacgtagcgtcatccagcaaccccagggcgattcctttgggcagcggcattttgcgggcgactccgtccggtcccagaatgatgggatgcggatgcccggctgtagaagccgtcatgaccccggtttccagatccaggtaaatataaacggcagaggcaaacatggtggtgttcgcccgttgcaggattttggcgagctggtggttgagggaagtaaggaaagccgccgggttatccgccaggtgggacaactgttccatcaggccgcggagcatggaggcgatcagggcggcgcggatgccgtggcccatcacgtcacagacaatggcgccgacgccggaactgcctacgggaaaagcatcgaaccagtctcctgcaaccccctccgaaggagtgaaaatatggtgaaaatccgcatggcgggtcaggccgtgttccgtatgggagcgggagggaatttcgtagggaagcagggcgaactggatttccctggccaaatctatttccttttccagagttctgttgcgttcctccaggatgcgggccgtttccgtggccttgatttcagtcttcaccagtttggtgacatcactggaaatacctacaattccctttagctctccgttgcgtccgtaccacgggaacttgctgatctggctccaggaatcatccttgtggagccatgtctcatgatgaaggcgggcgcggatggggcgtccggtaaccatgatgtccatttcctccttgcgggaaatatcggacattgtttggtcaaaaaagtaatcgtccgtgcgcccggtcaggtctgccggcgtcggtacgcccagcttattggctgtggcggtattcgccaggacgaaacgtgattcccggttcttgaaatagatactgtcgggaatgtgttcaatcagggtatgaaacaggtccctgtcctccgcagcacgcagttccgccgttttccgccgggtaatattgacccatacgcccaccagcataacgggccggcgctgcttgtccctgcgggcgaggccgttgacgcggacccagctccagcttttggagttcagcttcttcatccggatttcaatgcgcatgggcacatgggagtggccgtccagataacggcgcacttcctgggaaaaaaaagcctggtcttcctcgtgtatggtaagctccggctgggtgaagatattgggggctttctccttgcggctggcccccatcatggtcaggcagcggtccgtgtaatgaatgacgcccgttttaatattccagatgtaaaatccttcttccgccgccgccagggccattttgattttatcccaggtaaaaactctctgggcggaatgtctgttgcgtgagggcggcattgcagttgcccttaatctaacgacaaaaccgctgtcttggcaagaggcaaaataaaggaatcctttctgaaaggaggcctggccgggggaacgcgtatgaaggacaccggctggtttttaagatggactcctatttttctttttccttttcctgggattgaagaaattgcagttctttcttcaaagcgcttcctacgcggtgctttgccagatagacctgggcaatcgtgacgccgagctgccggcggaccttggccgcgtcccactcccgcaggacataatagtcaaaaatctggaactgcttgggcgacacttttgctttgacgcgttccagagccgcctgaagaaggttattctgccattcccgttcccatacctggtcaaaattattcttcccttcatccgggattttgtcgatggggtgttccagggtatccgtggcatcaggattcatcagcatggccgtgtcctttttccgcttgcggaactggtcattgatgcgccagcgggtcatgttccatagccagagtttgaaggaaccctgttccggtttgtaaatatttttcctgctctgcttggcgatggaaagaatggtttcctgtaccacgtcccaggcctcgtcttcccttaatccggccttgagggcgacggaataaataagccgccaatatgtccggtaaaattcatcccaggtacgctggtcttcccagttttccaaacgcgcgatcaggcttttcctggtatgttccgcgtattgggaaagtgtctgctcgtcaggctgggactcgttatggggttgcaatgggggcacattcatggtttatcatgaactacggatggaagtgaagcgaaagccgagtaataggccggaaaattctgcacggtccagcctgttcattcactacgtccgtcgtggagaaaatctttcagggaaacggacatgatcaggaaaacgtcaaaacgcaggggaacctccgtcattgcggccctgattgcgttgtgcgcggtggtggggtacggtttgacggagtgggcgccgctggataatgaaccgcaggcggttcccgcccgccagagggaagagcggcagacggttcgggagaaggtggaaatccccgacaagggggagcccgttcgtttgctgaccatgaacgccggaaactactttgtgccggaagacccgaggagaagcaattttcaggtaaaatacaagcctgtggaagcccgtgaagccgtggcggagctggttcgccaatcgggggcggaaatcgtggggctgtgtgaaatgggcggggaggctgccgttcgtgacttgcaaatgcggctgaaaagaaaaggagttcatttgccgtacaaagttcttgtcatgcgggacggggaggaccgtggtttggcccttctttccaaataccgcatcgcggatgaccgttccgtaacggacatgcctgtatccggagaggcgaaacggaaaaagacgatgctgcggggcattttggacgccacggtcagcatgccggacggacggctgttccgcctggtgggcattcacctgaaatcacgcctcagccgtgacggttccgcagaggacacacggagaagggaagcctacgccctgcgggactacctgaatgaagctcttgcctctcaggacggcatgcctctgcttctgtacggagattttaatgacggcccgtcaaacagcgccgtgcaggtcatccaggggccggccaaaacggaataccgcctgaaccgtttgaagcccagggattctcgtggtgagacctggaccatttactacgaagacggtgacacctaccattccttcgaccatcttttcctgaacaatgctctgaaaaagcgcctcggccgcaagcctcccatgggcatccttgactctcccccctcgctccaggccagcgaccaccgcggcgtgtgggtggaattaagataagcagggcctgatgttttttcagcaggggagatggaaaaggaaaaaatgaaggctttggaaaaggaggacaaaaaattcttttcttgtcgttccggccttatccttcttgaaatgcgggagttggaccgaccggatgtttttcttttccagaaggatgacggaagcagggatttccgcatggcgattccttgccggaattttgttggacaggaacatatcaggcattccagttcctcaaaaaatgattgccgtgtccgtctgaaatgggtagcatgccaaaaatcgttgttcaatcctgcatcatctgtatgagatattttttcaagcattccggaatggctccgcgctgttcctcgccggggagcaaggggtttaccctggtggaattgattgttgtcattaccattatggttgccatgatggccttggccgctagcatgttgaggggcgggggcagggggcaggggcttcaggccgctgtggaaatggtggacggcatggtgcaggaggcgcggctggatgccatgggcaaaggaacgtggagccgcctgattattgtgagcactcccgatgacgaatcccgcaatatgcgcactttgggcgtgatgtccaaaaatacccgtaccgggaagtggcatctggtgaaccgtttgcagactctccccgccggtttttacgtcagtccggcctacagcacccttctggaaggctcgaagaaagccagaggcgagaaatccacggcccgcggttttgccagtcgtgacgggcaggataccgtcaaccttcccggtaacagaatgacggatatttacttcattgaatttgacgaggaaggccgcatgtcccagccgaacgcccccacccgcctggtggtggttgccggttccgccggaaacggcaaggaggagaggccaaccccgatggtggacggcaaaccgggcctggcaggcggcattgtgatttatcccaaaggcaatatcagccgtctgaggacgacggagcaggtgattcccaattagtttctgtgatataataccggatttcccattttatgttgaccaagtgtatgaaacagtctcgtgccaaggggttcaccctgacggaagtggtgcttgcgatcggcgtggtggccgtgctgattgtagtgttcatggccatgtttattcctgccagaaggacggttcagtccgccctgactattcgtgaagcggaccgcatcgtccacgccctgacggcggaacttggagaactccgcaattccgagcgtgccgcttccaatgccagaaagtcttcctcctccaaatatgtttccgcttttgacaaggcgttttactggatgcagttcacgtccaggcccgctacgaccattcttgtttacaattacagggcggatttgaccaagggggcccgcaaagacggaactccccagccctggctggaggatggcggaagcattcccggcaaaaatactgcggtggtgacaggggtctgcctggcgaacaacaaagagcgttgggatgatttcaaggcccttgtcggtcccgtcttcgccgtgcgcatgacccagctggtagtggagcgtatggattcaagctcttacgggtacaagctggctcccaagtacgggacgatttataatccttacaaccgcggcaaggtgattaaggaaccttccctgtatgtttatacgccggagaaaggcggcggcctgaatttgccgtggggggcggaagtcctgtaccaggcggagttcttccagctgttgaatacggaccccgagcgtttacaacatctgacgtgggaaaatttaaagactcccgtgtttacgcgcaatctcgcttttcgccgttagtgggcattatctgaagacctttgaaaaaacatgaagacatttgccaaaatcaaatccggcgcgttcaccctgattgagctcctggcagccatgaccatcactaccgtgctggttctggtaattgtggccctgacttcccgcggggtggatatctggagatgggtgctgcaggatgtgcggaccacgacgcttgcccgcacggccatggataccatgaccaaggattttgaaagcatgcagttccgttccgggaatccctttgagtggatgctggtgcagcgggacagcgatttggtttcccgtgcgggaaagaccaaggtttccaggaaaaggggccgctcctcctccctgaatgaagcccgcgtgaacctgatgaccatggggccggaaggcgccaaaatcacgaatgcctcccaattggttttctttaccacggctacggaccgcaatccggccaagtccagcatggacatgcggaatgaccgcatcatcggcgatgtgaattgcgtggggtacaagcttctttaccgtgaccagattctggaccaggatgctacggcggagtctgacggttttcccgtttattccctgtaccgcaacttaatcagcgcggaggataccgtgcggaaccttctgggccagcaggatctatggtccgcttatgcacggtaccagcaggatgaaaccgtcccttccaacttcctggtggaaaatattgtggaaatgacgctgatttttgaagtggattaccagaagaagatcggcaattccggcagcaacaaatcggacaaggatgcctcgcaaagagcatccgtgctggttccggtcatgactacgggcgccaaccgtctcggctcctgcacccagatggatgtgtatggcaatcgcctggacatcataggcagcagcgtgaatattgatgatttgaaatccggccgcgttactgccgtgacaatttccatgacggtggtgacggatgaaggcatggctcttgtggaccagatccggcagaaaaagcgtcccgctccttctcctgaagaatttttcgaacgttatacccggtctttcacccagaggattgcattgccgatgaaccgttaggtttgtatccgggaaaccggggagggcggaacgtccgctgttgctttttgcctggagcgttcctgccattaattgttctgtagttgccatatgttgggtttcacaaatatcgtcggcaatttatctcctctgccggaattagtgctgtggcgcgatcctgtcgccagaagcggggaggaagccatggccgtggacgaagctctgctggaatggggcagggagcctgtgctgagggcgtaccgctgggcggaaccgaccgtgacttacggttatttcgatgaggaggccacggcgcgcgccatttttccgggtgaggagcttcattttgtccgccgctggacaggggggggaattgtagaccatcggcaggatattccctttactctggccatgcaccgcaagggagaaaaagagcgtccttccagcgcggttttgtaccgttggattcatggggcgctggcccgcgtcctgagggattgcggcgtggagtgcgtgatgctggacggggatgccccggacggagggcgggcctgtttttccagccccgtaacgagtgatcttgtccttcccggcggggaaaaactggctggcggcggtcagagaagagtccgcggaggcgttcttcaccaggggagcatccagaattgtcttctcccttccggatgggatgaattgctggccgcccgcctggcggaaaagcattccctgtgcgtggacgcggaattgttccccggcatgaatgcccgcgtggaggaactgctggcttccaaataccgtacggaagcatggcgttccggcgtacggcatggacgtccgtctcagccacggtaattccccccctttttttctttccgatgaattatcttccagatcccggccgctatagccacgcagcctaccgccgctgcgggcgcagcgggttgctgcttcctcccgtttccctggggctttggcataattttggcgctgcggatgattttgagaatgctcgtcggcttattcacggcgcgtttgatgccggtatcacgtattttgacctggcgaataattacggacctcctcccggttcggcggaagaatgctttggccgtattttcatgcaggatttgtcccgtttccgtgatgaacttgttattgcaaccaaggcggggcatctgatgtggcccggcccgtatggggattggggatcccgcaaacacatgcttgccagcctggaccagtccctttcccgcatgaagctggattatgtggatattttctacgcgcaccggcatgatccggaaactccccttgaagaaacggcgggagcccttgttacggcggttcgctccggaaaggccctgtatgccggtatttccaagttcccggcggaacaggccaggcagatgtgctccatgcttggggaggccggcgttccgtgcctggtacatcagattcgttacaatatgtttaatcgggaaccggagaaatccgtttttcaggctgttcgggaaacgggtaccgggtgcgccgctttctctcccctggcccaggggatgttgacggaccgttatctggaaggcattcctgaagattcccgcgcggcaggttcctccggctttttaacaaaggagcgggttcttcagcatggggataaaattcgccgcctggcctccctggcccggagccggggccagagccttgcccagatggctctggcctgggtgctgaaagatcccgtagtgaccacggccctgattggagccagccgcccctcgcaaatcagggattgcctgaaagcactggatagtgcgccgtttacgccggaggagctctctctgattgacgcagatgcggatagataggcgctgtttttcccgtggtgctggtctttctgctggaaggggcatttcccgttccggacacaggttttttcttggagtaaagtagagctggtgttatgtttttactactttaatttaaagtgtactgacaatgataaccatccaggatttattttggctcatcccatcggcttccgtgctggccctcatttttgcgggcatctttttttaccgcatgaaagcgcaggatgaggggaacgaggtcatgaaaatgatcgcccggcatgtccgcagcggcgccatggcctacctgcggcagcagtataagattgtcgccattttctttgtgctcattactgttgtcttcgcttttctggcctactgcctccacattcagaacccctgggttcccttcgctttcatttcaggcggttttttctccggtctggccggctacatcggaatgaagacggctacgtatgcttccggccgcgtggcgaatgcctgccgccattccctggatgccgggctgcaaatagctttccgctcgggcgccgtgctaggcctgaccgtcgtgggccttgccatgcttgatatcggtgcctggtactgggttctggattggttttacggggacatggagctttccatgcgcctggtcgtcattactaccaccatgctgacgttcggcatgggggcttccctccaggcgctgtttgcccgtgtgggcggcggcattttcaccaaggcggcggatgtaggggccgacctggtggggaaggtggaggccggcattccggaggacgatccccgcaacccagccaccattgcggataacgtgggcgataacgtgggggacgtggccggcatgggggcggacctttacgaatcttactgcggttccattcttgcttccgccgctttgggtgcggcagcttacatggccgttcctgaaatggcgatcaaggccgtccttacacccatgctgatcgccgccctcggcaccattctttccctgttgggcgtgtacgcggtgcgcgtgaagcgcggcgcttcccaaacggagctgatggcagccctgaaccgtggcatcaacttgagttcctttctgattgccattgcttccgcattcctgctccagctcatcggcctggataactgggccggcatctggggggccatcgtcaccggcctggcggtgggcatcgtcatcggcaagagcacggagcattacacctcccatgattcctatccctgccgtaaaatcgcccacagcgcgaagacggggccggccaccgtcattatttccggcatcggcatcggcatgatttccacctgcattcccgtaattactgtcgtcgtgggcactgtgctggcttacggcctggcttccggggactggcatttcaccggggtggaaatgagcaaggggctgtatggcatcggcattgccgccgtcggcatgctttccacgctgggcctgacattggcgacggacgcttacggccccatttccgacaacgccgggggtaatgcggagatgagcaagctggacccggaagtgcgccgccgcacggatgccctggatgccctgggcaacacgaccgccgccacgggcaagggatttgccatcggttccgccgctctgacggcattggcgcttctggcctcctatattgaagaattgaaaatttccatccttcactggagtgaggccacgggcaataccatttacaaaattaatgatgccgtgagtgtggaggtttccaaaatctccactgcttccctgtctgatttcatgggctatttccaggtaaccctgatgaacccgaaggtgctcatggggctcttcgtgggggccatgatgtccttcatgttttgcgggctgaccatgaatgccgttggccgcgccgcggaaaaaatggttaaggaagtgcgccgccagtttaaggaaatcaagggaatcctgaccggagaggcagaaccggattacgtgcgctgcgtggaaatttccacggcgggagcgcagcatgagatgatctggccgtccgtactggcggttatcacccccatctgcatgggtatcgttttcggcgttcccggcgtgttcggcctgctggccggcggcctggcttccggctttgtgctggccgtattcatggctaattccggcggagcgtgggacaatgccaagaaatatattgagcagggccatgtgggcggcaaaggctcggaaagccataaggcagccgttatcggcgatacggtgggcgaccccttcaaggatacgtccggcccgtccctgaacatcctgatcaagctcatgagcatggtggctatcgtcaccgccggcgtgaatatagccgtgaccctgttctaaacagaaagattctttcacggaaaacggagggagtccgcaagattggcggactccctttttttctggctgaagggaaccgtccactggtgagcggttttttaatttccgcttctttcaaaggctctctgaaagactgttcctaataggggggggagggggtaagtatgattttttaaatcatatttttatttgtatcagattttatttttattattataaaaaataacaaaatgactgacagaataggccagctggctttttcttccttccggtttttattctgctgtctggcagttttttccggagttgttcccttgtgggcctcggatggcccggatgatgacatgaaggagacggaagaggaagcctgcggccccctccagattaaatctcagacagagttgtgctctgcggattattatatcaagggaggaattgaacaggacaaggaagacgatagaaaaagaaaaaatataggagtcggggagaatatctcctttcttctgatcggcaagcccaggggagatatcaaggaacttatttggagtatcaagggagacggatttcaaccgacagataatgagtcatttaaaggtgaacaaaagatcgccctgagcgccagaaaagatttaaccaaagatacccgcgtcaccattacagccaaaaccggtgaaggcaaagaagctaaaatcaccgtcaatatcaggattcccaagaagataacgaaggaaaaatatgagggacacatggatttgggagatggcttttccgccaatacggccgatcttaaaatatccaagggggaacacggtgtctggggatttgttaaagtgacgctttttcctactgacgtcagttttaagggagtcaaggtgattgagcgggatgggggactcatgtgggaaggaaagaacgggactcccccgcggcctcaaccggaactggcagccgagcatgtaacctgcaacatggccgctcccattcaggataaaaataatttttatgatatggtaggggacaatcgcaatattaaggaagttcttgaaacgattcgccggtccaaacataatcctcaacaattttggtttgtatgcaacttccatattcattggggaaagggagggaaaggcagtgaacaacaggattccatttttttaggaacgacaaatcaaaaataccgtattgaagccattgatcaaaataccacaaaaacggttgttgagaaattcggcatcacctttacaagaaccagcaatgaggattaaaaaacaatgaacctgttacctcctttatgcgcatgtgccgtctgcctgatgatcgggaagggcaatcaggcctattccgattctcccctggagagcccggcgtgcatcgaccagtacaaacagccgtccgcaaccattcgggaactctccggtttgctgaaggacatgcggctcaaatccttctataacggggccaggaaacatacgctcacctttagtttgacgacacaggataacattgataccgtgctgaaagagaaaatatggcattgttatctggtagcctcggcacccctttttacctacaaaacgtaccgggaaatcgagccggatgttgatatgggcgatgatagggctgatattcaccacaaatccagagtctgcctcctcatggaaaaatatatcggcctggtctggaagacgaataaaatcaaggaacccgttaaaaatcagatcatccggcgcctgtttcttccctattacgcgcgcatcctgaaacagtacaaaaacgcgcaggagctcaatccctaccggagggatgcccagggaaatcccgtccctcccctttccgacaaggaaaaggaattccggaagcgtgagatagaaagaatcaaacgtctccccgttcaggaagtcctcaaactgatgcgtgaaggttcaagccaccgttcttttatcgagacgagaaatgaagtatttggagacgaagtcaagcatcttgaaaaagccttgatgaaactgcttgtttccgaattccccggtcaatacggcaaggttgagaattttattctggaagccggatattcaaaagaagacatccccggtttgattgaccgcaccgtgggcagggacgaaaagacggatttcctttatcaagggaaacatcgtcagaaacatgacaagctctacagggaaaagaagtgatggagtccagccccgaatgttcaagacgctctttctccctttcctttttgtgaaaagatatgccggaaaccggggggagtgaagaaggctcgagtccgatggcaaggcttgcaataaccggtttctggaaagggaattctggattcgtaaaaaaggaaaagaaaaacgtgttgcgccagttggcagctccgttccgccagtgggagtggggcgggcgtttcctttgaaagtttggaagcgccgaagaggcgtcgtgtcttctctgggcagattgagaagccaatacggttttttcgccattgacggaaagtttttttgacaaagaaggggcagaggagtaataaacgcgcagatgcatttcagcactgtacagcccttttttagcaagaaccgttattatggcaacggctattggtggcgcgtacccatgtccggacgggggaatcccgaggtgcagtaatagcattcagctatgaccatttttcaagaactgctttgattcctccgagagtcaaagcagtttttttattttcaacttacatcatcatccatgcaaacaccatccatgatcactctccaacagcgcagccgccgcctgagcgccgatctggagacccctatcagcctgtttctgagcctgactcagaacaaaattcccggacttctgctggaaagcgcggaagtggacggcagatgggggcgctacagcatcatcgcctgcgattatctgatgaccgtttcctgtgtagacgccaggctttccctttccatcaaagacgaccgtctggcttccctgaaggagctggaaggcatgccttacctggatggactgcgctctctgatgcagcgtctggagctggtgggggacgatatgaggcaggctcccattacgcgggctttgtacggctatttcgggtatgaaaccgccgccctgttccagcccaggctggcgcaggccattccggcttcttccgcagagtcctgcctggtgctggccggcaccgtgattgtttttgaccatttgtacaatcgccttacccaactcagcctgggtgaacaccgggatttgccccatgccccgctccatggggcggaggaaccttccgtcggggaagtttcccgcacaccggaccaggcagcctacatgaagggggtagagcatatcaaggagctgctgcatgacggagaagccatccaggtggtgctttcctcccaggcttccgcggagttccacggagacgctttcatgctgtaccgccgcatgcgcagcattaatccttccccatacatgtttttcatgcgcctgccggaggtgacgctgttcggatcttctccggaactgatggtgcgctgcacggacggcaagcttcagctttcacccattgccggaacgcgcaggcgcggcagggatgacgaggaggatgccgctctggctgccgatctcctgaaagatccgaaggaatgttcggaacatgtcatgctggtggatctgggccgcaacgacctgggccgtgtcgccaagcccggttccgtgaaactggaacgcctgatggagattgaacgtttttcccatgtgatgcatatgacttcccgcgtgaccgcccaggtgaacgacgggttggacgtcttggacattcttggcgctgccttcccggccgggacggttagcggagcccccaaggtgcgcgccatggaaatcctggcggaggaagagcctctgccgcgcggaccgtacgccggatgcatcggatggctgggattggacaaaaacggcgtccacatggattccggcatcaccatccgcagcatgtgggtgaaggatgggcgcatccactggcagacgggagccggcatcgtatatgattccgatccggccgcggaatggcaggaatgcatgaacaagggtaagattattgacgttattttgaaaggagaagaccatgtttctgttcattgataattacgattcgttttcgtggaatctggtgcaggcgttttatgccctgggacgcaagcccgtggtgcatgcgaatgacgatcctcgtattctggaactggcgaccagcccggagctggaagccgtgtgcatttcccccggccccagccatccgcgcaacgccgggctgtgcctggagttcctgaaacgcctccccgcttccgttcccgtgctgggcgtgtgcctggggcaccagcttctgggctacttcgccggggcggaggtttcccgcgctccgtatgtcatgcacggcaagagttccgacatcatccatgacggcgctgggctgttttccgggcttcccaatcccatgaccgtgggccgctaccattccctggtggtccagtccaaggaggacgagccgaatccccgctttaccgttacttcccgcgggccggaaggggaagtcatggccctgcgctacaatgaccgtccgtgggtgggcatccagtttcatccggaatccatcctgacgccgaacgggcttcagcttctgggcaattttccggataacgtcgtgctttcggggcagaaggaaaagcgcatcagccgcattctggacgccctggccgccggacaggacctgacggcggatatggctgccgcaggctttgcggacatcatggatggccgcatgactccggctcaggcgggctgctttttgatggggctccgcatgaaaggggaaaccccgctggaaatggcccacgccgtgggcattgccctgggccgcgccaaccgggtggaaggtttggaaggcgactgcattgacgtggtaggcacggggggagacggccgcaactctttcaattgctccacagccacggctctgacgctggccggaatgggatacagggtggtgaagcacggcaaccgcgccgtgtcctcctcctgcggttctgcggacgctctggaaggcctgggattcccgctggacgtagctccggaagatgtccggcgcctgttggacgagcggaacttcgctttcctgttcgcgcctaattttcatccatccttccgcaatgtaggccccatccgccgggagctgggcatccgcaccctgttcaatctgctgggccccctcatcaacccggcgcgtcccacgcacatcctgctgggcgtggcccgtccggaactcgttgagctgctggcggagacgctccgccagtcccacatccgcaaggctgccgtagtatatggcgccgggggatatgacgaggtgacgccgctggggcccaccaagatgatgatcatccacaacggcaggctgacgcccatgtccctggatcccctggattacggcatccagccctgcaatccggaggaactggccgttcattccaagtcggaagccgtggacgtgctgaaaaacatcctggcggggaatggcccgcgtgccatgatggacatggtgattctgaatgtgggggtagccatgttcctgctggaggagcacatggacctgtccgtctgcatggcgaaagcacgggaagccgtctgcgccggcataggaaggagaacgcttcatgctgcttgaccggttccgggaagccaaggcggaggaaatagccctgctcacggacatggcctcccgccgggaactgccgcgcccgtggaaggggcgccggccggatttcctgaaagccattgcggaaccgccggacgggcagcccgtggcggtcattgcggagttcaagcagtcctctccgtcgcgcggtgttatcgccaccgggctgaaaccggaggaagtggctgaacaatacgctgcggcgggcgcctcctgcatctccgtgttgacggaagaacagtttttcggcggccgcatcggatatttggaacgcatgagccgcgccgggcttccgcttctccgcaaggatttcatttttcatcagcttcaggtgatggagacggcttctacgccggcttccgctttgctgctcattgtccgtctgacgccggatgcacggacgctccgtgttctcagggagcaggcgggggcttacggcatgcacgccgttgtggaagtgttcgacgctgcggatctggaaattgccagggactccggcgcgcgcatcatccaggtaaacgcccgtgacctggacacattgaaaacggacaggcaggcctgcctggacatggcgaaattccgccgtgagggggaggtgtggatcgccgccagcgccatgagcgccggggctcatctcagggaagccgcggaagcggggtttcaggccgtactgatgggaacagccctgatggacggaggaaggccgggtgaaaaactggcggcaattttagaagaaacgatatgaagaagcattcatttgcaatcaaggtgtgcggaattacccgccagagcgatttatcaaccgccatggggatgggggcccatttctgcggcttcatctttcatcccggaagtccgcgttatattgcgccgtcgcgcgcggcggctctggactccgccctgatccgccgcgtgggcgttttcgtgaaccagaacgcggaggaaatcatggatatcatgaaaacggcccgtctggaattcgcccagcttcatggcgcccattctctggactgcgcgcgccgcatcggtccggaaaaagtgatccgcgtattgtggccggaccggtatgaatccgtagaggccctgcaaagggaaatggagctatgggcggacagctgcgcctggtttctgctggatgccggcagccagggcggcggccacggcgtttcccttgactggacctccctggcgtctctgagttccccccggccctggttcctggcgggcggcctttcctccgcctcactgaacagggctctggaacaatgctctccggacggcatagacctgaactccggtgtggaagccatccccggccagaaaagcccgcaaaaactgctggcggccctcaaaccactcaccccttacactccttaccacatcgcatgaagaaagaaggatatttcggcaatttcggcggccgcttcgtaccggaagcgctgcgccccccgctcatggagctggaggaagccatggactccatcatgccgtcccgcgagtaccgggatgcgcttcaggatctgctggtcaattacgcgggccgtgaaactcccctcacgttctgtccccacctttcggaaaaactgggcttccgcctgtggctgaaaagggaggacctgctgcacaccggagcccacaaaatcaacaacgccctcggccaggcccttctggccaaaatgatggggaaaacgcatcttattgcggaaaccggggcggggcagcacggcgtggctacggctacggcggccgcccggcttaaaatggactgtaccatctttatgggcgcagaggatgtagaacgccagtccatgaacgttatgcgcatgaaattgctgggagcgacggtttttccgattgagagcggttcccgcacgttgaaggatgccattaacgaggctctccgctactggatttcccatcaggcggataccctgtattgtttcggtacggcggcgggcccccatccgttccccacattggtcaggcagcttcaatccgtcattgggcgggaggcccgcgcccagatgctggagcgtgcaggcaggctgccggatgtggtggtggcatgcgtgggcggcggctccaatgccatcggcatgcttcacccctttgtggaggatgaaggtgtccgtctggtaggggttgaggcgggaggcaccggtgagcccggctgttataactccgctcccatcaatctgggcagccccggcgtgctgcacggtcatgtgaccatgctgttacaggatgagaacgggcaaatacagccgtcccattccatttccgccgggctggactatcccggggtaggcccggaacatgcctatctggcggaaacgggccgtgtccattacggtgtgatttgcgacgactctgctttaaacgctttccggacgctcaccagagaggaaggaatcattcctgcgctggaatcctcccatgccgtggcctgggtgctggaccatgcggaggaactgccgcaggggggggacgtcctggtcaatctctccggccgcggagacaaggacctgggaatcgttaaaaaatatttgaatctttaagccgcattcttccatgaataatatgcagaaatcaccgttgcagaaagccgtggagagggcccatgccctcggcaggcgtgccgttatccctttcattaccgccggattcccggacaaggaatccttctggacgcacttgtcccgtattgacgaagccggggcggatattattgagataggagttcccttctcggatcccgtagcggacggcccggttattgaacaggcatcccgggatgccctggcccgcggcgtcagcctgaagtggattctggacggtctgaaagcccgcaagggcggtttttcagccgaactggtgctgatgggatacgtaaatcccttttaccggtatggcttggaacagcttgccttggatgcggaggaggcgggcgtcagcggtttcattgtaccggatatgccgttggaggaatccggaatgttccgggaggctttcagtccccatggcctgacgctcgtcactctggtggctcccaatacttccgtggaacgcatgcgggaatacaagccttatacttccggcttcgtttatgtggtctccgtgctgggaaccaccggtgggaaagccagcctggagcggagcgttacggaaaccatgcgccgtgcccggtccgtttttgatgtgccgctggcgctgggcttcgggcttcagacgccggaccagctggagacgctgcctgaagatgcccggccggatgccgccgtgcttgggagcgctctgctcaggcacattggagaagggaaggacgccggggaatttttggaaaaatggaccagaggttgaactggacgtttctctctggtttttaaggatgggcctgcacaacttattgtgcaggccctttttattttatctggtaatgggcggcgaaaatgcggattcgcaatccgcttcgattttattcacatattattcaatttttaacagaataattgtattgataatgaatatgttacatatctttaacataatctgctggcgggaatcccggatttttttgacggagaaaacgttccgggtattccggaaaaccgttgtaactgattcttttcctttgacagcggattgcgaattccttatttatattcacaatcatatttcccttgccgtgttgtgggaaaggttcttatttgttcattaaatacctaattatcaaacgtttcatgaaattacacctccctttgaatttattggctgccttgatgacctccttttccggagtaacgcttggcaccgccacgctggcaggagtttctggtcttttggtgacagcatcacagtcttatgcggcggatgtcgcctttgacggaacccaggtgaatgtggcggcgggaggctcggcctcctatgatgtcggtactgttacggcttctactaccttgaattttgccggagccggtacggcctcaatcaccaatttgaacgggacggctccggaagccatcctgacggtaaaccgggtggccaacgggggcgccagcctttccaccctgacattgaacggggcaggcactttcaacggaatcatttccctttattccaacacgacggggggatctcagaacaacatcctgaacctcaaccatgcgcaggccgcccaatacgccacgatcaaactgggcggttacggttatacgacgggtgcttccgtcctgaaagccggcgtgaacacttccatcagcaagctggagcacaacaatgccgcggctttgatcaccggggaggggaccacgctgaccatcacgggggattcttcctcttacggcggcagtttcggcggcaccgtaacggtggactatacggggggaggcaccttcaccctgggcaattccgacaagaatacggcgctctctcccgcggcatctccgaacgcaaccctgaaaatcagcagaggcactctttccctgttctccggaaatgtcacctggtcccaaaaactggtcatgggtgacggtaccacactgaatattcaggacggacctcccgtgacgggagctgcctcctacaatgccgcttccatcaatagcggcggttttaatttttccggagcggtgactctcggcagcggcgtcaacctgacatccagctggggcaagaacgtaaaatttttccggtgttctcacggcggcaagcggtttttccatcagcggcagcgcgaatgaatatacctattacaacctgctcaacaccgccaatgaaattggggggacgatcgccattacgcgaagctttgcctctctgggcatcggtgcttccggctcccttgggactgccgccgttactacttcggccaactcccagtacctgacctattacggcactgcgggggatgtggcggatgtcattgacaattccatcaccggggcaggcaacttcgtcgcccagtcgggctgggtgcatctttccgagaacgtggcgcttacgggaacctataccgtcaattccggcgccgtcctctccagggccggttccattaacgccgcgcttgccggaggccggctggatgcgggcgccggaaccatgaccgtgacgggactgtcgggaaacggcaccatctccgcctctgcgggcaccatgaatttccagaacgccttcacggtaggggaaacgatgggcatcctcgccaacggttccgggacgatcacgggcaatgtgacggtggatggaggccgtttgtattatacttccatggacaatgtcggcagcgtgctgcagaacgtgacgctgacttccggcctcattgatttctccggttttcaggaattccaggacttgttcggttctgaagccctggtgaacacctcctataacctgggcgttgatttggggaacggctttactctggcggatgttgacgagtccctgtacacaatcagcaccgtggacggaaaaacagtcatcacgtttacggcttccggcgcccatgagaccgtctgggaccctgcctgggggctggaagaagctccctcttccgcaacaggtacgctggtaaaccaacagtctttgtccctgtacggcatccgggcttcttccatgcaggaggggttcggttccgtgaatgccgtcaccggaacgggagacctgacaggagtgaccctggccggcggctactacaatactgccaccagtgccacggctacggaaatcaccaccggcatctggacggatgtgctggggggcaattacaatctgattatcggcggcagctatgccaataactggagcggctccggcaagtggaacgttacgggagacgtccatacccagattcagggggacactgccgtcaattgggttgtgggaggcaactacaaggacggccaggcggcaggcatcacgggaaacgtttacgtatccgtggacgggaatgccgtcatcaagggcagtttgataggcggcggcacggcagcccataattccgtaaacaaccttgacggcagcacgtacgtcgtcgtgcgcagcatgcaaagcgtcacggacgaaaccatttcgctcaactccgttgtccggggcttcatcattggcggcagcacttatgaagccaattcctcgtcccgtgccgccattaccggaagcaccaatgtgacgattgatttgggaacggcctccggcagttttgtcaagagcatcgtgggcggttcctattcgggaggttccggggcatatacggttggaggcgattccagcgtcagcattaccgccgccagtgacgccgtctttaccggggctatttacggcggcgggttcagctcatcaggaacatccgccgtcagcggcaattccagcctgacgctggatggcggtgcgtacacgggtgctctttacgcgggtggcggaggaacagggtcttccgtaaacggggacgctacccttaccgttaagaaagcagtattccggacgggcagctcgctgaatgcgtcgggaggcacgataggcggcacctcttccttgctgctgggaggttacggcaatacggcggatcacgccatttccttctccaatacggctgtggccggtttcgacatcgtgaccatgttccaggattctttctttacggggaatctgaacatgaccggttccagcgtgctggcgctggcgggaggggcaggaacgggaatcaatctggacggctcgttctctctttccgctgaaggggaactgaacctggatctttccgaattcggcaccctgacagacggcatgtccgtcctttcaactacgggcctgtccaatatatcttccattaaggcttcctttgctgacggtgtggctgggtccatcaccatttccgacaacggcaaagaccttgtctatacggcgggaaccctccttttgtgggaggggggtgaaaacggcgtctggagcgcggaacatgtctggacggacggcggcgctcccgccacatatgcggatggtatggcggtttcctttgcggaccaggccggagtcgctaactctgtcgtacagctggattctgaggtttcgccaagctccatgcttgtccgcaactccactacccgttatgaactgacggggacgggagaaattaccaatacggccgtcgccaaggaaggcacgggaacgttggtcctcggcacctcttccatactcggcacgggtactactgtggctgtgtcgcagggtgttctggcattcggttatgatactgctcttcccggcacgggggtaacctgggaggccggttcctttttgggtgcggccaatggagcgacggtgacggtggatttgggaaccgtcactaacccggtattctccctttctccggatgccaactctttcatcactctggcgactccgtccgacatcgttttcggcaatgccattactggggaaggaactgtccggaaaaccggcactggcttgctgaaactgacggggagcaactccggccacatcgtggtgcaggagggcaacctccagatagggaacggaacctcatccatccgctggggaagcgcgggttcttccgtcaccctggaaaacggcacgtcgctgattattgccggcagcagttcgggaacctcccaccataccatcaactccgatttgattttgggaacaaacgcgtccgacgccgtttccctgaaatgggtggacgcctcccaggcaagcgctgcggactatcagcatagcttcaccggaaccgttaccgtcaacggggcggtctccctggtgggcagggacaattgggccaaggaaatgggcttcaccggaacgctcactggagccggttctctgacttacagccgcggagcgggcgacggcaggtacaattccaacggaaagctcatcatcagcggagacgcttccggatttaccggaatgatcaccatgaatgcttccaacggctatagcaccgggctggatctgcgcacttccatctctcagggtggcgtcaccctgacatccggaacggacacgaccggattcgctttcatgcgcgtgctgggggatgttgaaattgcctctctggacggaacggaaaattcccaggtgggagccgtaggcggtgcgcgcacgctgacggtgggggccggcacgtacaacggcacgctcacagaccgtggtgttgctcttgggtacggagccacttccatttcgtatgacgaatccggcgtcctgtctctgaccaaggtcggcgaggaaacgctgacgctgggaggaacggtcagctacacggggctgacggatattcaggggggaacgctcgctcttactgcttccggagctacgtccctggggaatatcacgatggcggccaatacgcggatgacgactgcgggcgctctgaacctggcggccaactctacgctgacactggatatcagctccgccctcgaagtgggcggcgctttcggggccggaacgttcaatcttacgctgaacgggcttgaaggcattacggatgccggggaatataccctgatttccgccgccagcggtcttgatgccgccagcgccgtctttaactgggccggatataccggggacgaaacgctgatttatgaactggagcagacgggaacatccctcaagctggtagtgacttccgccggggacgtatggatctggcagggagcggaaggagtgacctggagcgatacgaacacgggcgccatgtggggcattgaaggttccacggatacggctgccgggaagaatctgattttcaacagtaccggggcgggaaccgtcactctgtccggagcggtgaatcctgcttccatcacagtcaacaatgctgccggaagcgattatgtcttcgtttccaacggcaccgggaaaatcgcccagggaacgttgaccaagcgcggcgaagggaagctggtccttaatttggacaacacgggctggaacggggatatttccgtccagcagggcgaactggtagcccaggtcgccaattccctgggatccggagccattaccgttacggacggcgtgctcactctggctacggcggacgttcagccgggaatgggcatgatcaacctgcagggcggcagcctcaatctggcttccggctcttttgccacggcgtttaccgcagacaacatgacgtggacgggcggttccatgacgctgggcgaggaagtggccgccaccgtcgccaaggctctggccaatggaaaagccgtggaattggcggacggttccgtactgacggtcagcggggctaatgataactcggctctgaacctgaatgcctccggttccggtaccgtttccgtgggactgggaaccagctatggggccaatgtcctgaatatgagtacggaattccaggggatcctgtccgtgacatccggctatttccaattgaataacgtaacgatgggggcggacggcatcttgaaactggcggattccaacgtccgtacggaatggaacggaacagccggaggaacgtttgccaatgacgttgtctttacgggcaaccaggtctttgccaccaaggatttcaccttcagcggcgatttgagcggaacggcgttctccacccagggagcgggcaatattaccctggcgggcggcgtcaacctggacggtcagctcaaggtgcaccgcggcacggttaccgtgaattccgccgatgtggccaagctgggggacagcattgacatccagaacaattccacgctggcctttgcccgcgatttctcctacggaggcgtcatcagcggtacggccggcagcacggtatccgtaaacgccggaacgttggaactcaccggagcgaacaccttcctgggcgcactctccattgcgggcggcgctacggcgcggctgggtgacggaagtgcttgggccgggtccctctccggagccggttccctggttattgacactgccggagagataacgctggcggccggcaacaccgggttcaccggttccacgacgctctccggaacgggcaccgtcaccttggcgggggccgactccctggggtccggacgggtcaccgtcaataacggcgttctcaatttgtcctctctggatgcggccaacgttattctgattacgaagggaagcctggcaaacgcggaagccaaaaccaccggaaacgtggaagtggccgcttccgccggaacgcagggagccctgaataccatcaatctgggcggcctgtccggctccatggtcggctccatcgtcatggaggattactcccggcttacaggcgtttccggtgctctggacatgacgggcaagacggtgacgctgaaactggattccggcagccttacagcgggcggaactaccggacagggcgttattgatgcggacagcctgacgttttcagccgccacaacaaccatcaacctcagcaaccagggtgttctggacctgcttgccgccaaccgggattccactgacggcgtagggcttgtactgacaacgggaaccctggctgtggataatttcaagcaaatcggattctctcctctcctggcttccctcggctataccgtgacggaagtcctgggtgcggacgggacgctgatggtcagcggcaatacggatcttgtctatctggtggacaccacccccaattcagacaaccccaatatcagcgattacgccgcgctggatccctacaaggctgtcggcattaatggcaccacgcttcatgtgagcctgaacggggctccggaagcctcccggaacggggacggtctgaaagtcagcaacctggttggcagcgacggtgcgctgaccgtgacgaatacggcggatgatgcggcttccaaccacgccgtggtggatctggttcaggatgttgacgccggcggcaacagctacggcggaaccatcagcggggaccatgtggattttgtcaagaaaggtgcggaaaccctcaccgtagaaggaaacttcaccgggaatgactccagtctcagttcctcggagggaaatatcatcctgaacggtgcaggcaatagccttactacgctggaactcgcgggcggagacataacgctgggcggacggaatgacggcgcctcccgtgtaaccacggtggagacgctggctgccggcgcgggagggggaaccctgaatttgggtaacggagcccagatggttcttaccggccagcaggccggcagccatgtcacggaagtgactatctccggggacggtacgctgaccttgggtggtacgggaacagactcctccctgacactgggcaacggctcttccctgaacggtgtcctgctggatatccgtgaagggtccgccctgtccgctgcaaccggttccgtgaataccgtttccggactggagggcggcggagctctgaagctgagcggtgcggaaatgacgatcagctcttccgattcccatacctttaccggtactctggacggggcatccggaacgctcaacgtcaaatccggcaacggaagcgtccagactatcaagggtgcgggcaatgcaggttatcacctgaatgtgagtgacggcggcgtgctgaccctggccggagcggcaggggagggcggcaatcccgcccaggcttcctatcaggggattaccgtgaacggcggcacgctcaatatcggcagcgcagacgatcccaaaacccagctgacgcttggctcggacggcttgagcgtgacaggggacagcacggtggccattaccacttcctccacaacggtggacggcctgggcaatccctttgtcacctccagcggaaatattacgctgggagacgggacgggggaagtcacgctggtcatgaacaatctggataccctggtttccgggagttcggaaacgctgaatatggaattgttcaagacaacggacggcgcgctggtgtccctgggtgacaatgtcaccctccaggacatgattcttggttccatgtatgaaaacctggagttgaccaccaatgacagcatgacggccatcatcctcaccggtacggcgcgcacggaaaacattttccgtgactcttccctgacgcggaatgccgctactggagcggacatcctttggaattcccgctatcacatggaggaaggctctgccttgcgcgatttctatacctctgttcttctttcccagaattcaggcgactattccggcgccgcccgcaaactggccgccgccgccggcagcacggttaccagcctgggcatcgcccagcgcgactccctgcgcgaccagatgggctggatacgcaaccgcgtggcgcagatgggcgttaaccctgcatatgtccatgaagacatgccctacttccatatgtggatgcagggaaccgggtcttatgccaagctggacaccaggggggatgaaagcggctacgaactcaccacctggggaggcacggtaggcatggacgtggatatcaacgaccgcatcactgcgggagctgcgtttactgccaattacggaagcctgacggccagagcggcggatacggcggacggagacctggacagttactatgtcaatctgttcgctcgctaccagtaccgtaaatggtcccatctgttgattttgacgggtggctggaatgatgcctcgctgacgcgcacggtgaattacggtacggggtcttaccaggcccgcggcaatacgacgggagccggtttcggcgccatgtacgagttggcgtatgacatcgctctcaatgaagacaggagcgtgattctccagcctttgtttaacgcttccatcgtgacgacccgcatggacggctatcgggaaagcggttctgccggaaatgccggactgaaggtggaagaccaggaactgactacggctgctgtcgctgtgggtgcccggctctccggactcatggggtccaatatcttcgggcgtgaagcgctgggagaagtacgggtgaacgtttcccaggatatgggagaccgccgcgggcaggctaatgtgggcttcctggcagatccctcctatacgcgtccggtgtatggcgccaaggtcggaagcacggccttccagattggcgcggggctgagcgttcccgtgggcacccagggcgtcatttttgtggacggcaatgcggatatccgcagcggttccagctccatcaacgggagtatcggctaccgctacaacttctaaaggaaaaaacgtcggccaagtggaaagccgctgcggatgattccgcagcggcttttttcatgaatgggcgggatttctttaaggataacttcaagcttgggttgacgtccctgatggctgcttacttccattcccattcaatgggcgtttccagatcgggccgcagcgcctggcgcacagggcaggacaaggcggttttttccagcatggcgcggagagggtggctgccttccaggggcatgattgccttcagttcaattttttcaattcccttggatgattccgccgcacgcgccagaacgcgcatgcctttcaaatccactccttttctggccgcgaccacggaaaccaggctcatcatgcaggaggcgagcgtggaaccgagcaaaactccgggggaggggaattctgcgcggccttcaaaagaagcgggcaggtccgtggcaaacgtaacgttggaaggaataaaggtggtttcgcagcggaattgtccgacgttctccgtttcggaggtgtaataatgatcagtcatgaaggtgtgacagcgaaaaccctgttcgggttcatccggttcaggttattttcacgttgaagagccgtgaagttccgctttgcagggaacctggccgttccttcatgacatggttgatttttccctcttgcttccggttcccggcatcacttctttttaagcgttgctccgccgtgtcttcttgcggcgggaaaaagcttacgccgtccccttcggcttccttgccgccagaatgcgccggatgggttccgcataaagctccggctccagcaggaaggaatcgtgtcccttggtggaagcgatggtatggaactccgtgggaatatgggcggcttcaagctgcgccgcgaaatcctgctgttccgccgggcggaaacagcagtctgtatcaatggaaaagataagcgcgggaatccctgcgcggcggaagccttccagggcggtttgaaatgttccgtccggggtgtggtcgcggatgtcgaactccgcccacatatccgcaatacggatataggcgttggcgtcaaagcgctccgcgaacttggttccctggtgaagcatgtagctttgcgtgctgcgggtgggggtcatccacgtgagcaggccgtagttgcctcccacctcttttctggcgcgctgttccagcccctcctggtaaacaaatgatttgtggccgatgatacgggcgaacgccagcccttttttgggcgccggtccccggtagtaatccccgccttggaaatccgggtcaagctcaatggccaggatttgttcaaacagggacaggcggtgttcgatggaagcccggtaaccggagccgatggagatgaagctccggacccgttccgggaactggcacgcgaagctgagggcgatcagtccgcccacggaggggcccataagatgaatgcgttctatacccaggctgtccagcagaagggcctggagacgtgcctggtctgcggcctccacatgcgggaagcgggagccgtagggctggccgtccgcagggcaggcggtagcggggcctgtggtgccgtagcagcctcccaggtaattggcgcagatgatgcagaagcggtttgtgtccagcggcttgccggggccgatgatgctgttccaccagccctcgtggttttccggtttccagagggaaccgatgcccgggacttccggattgtaaccgtaggcgtgctggctgccggaaagagcatggaacagcaggatggcgttgtctttattcggcgtcagggttccgtactgttcgtaggcgacgcgaaccttgtccagcgtagctccatttctcagggagaaggagttgggaagatccaggaatttggtttggacggcaggaagctgcatggatgtacggaaaggggcttggtcagcaaaaaaagaccggcacccggcgggcggcggtcttcttgaaatctgtgctgggccaggggttacttgacgccctttttggaaaggcgcgtgcctgccgtagcgccctggcgggccttgaacttgggattgctcttgcagatcacatacagcgtgcccttgcgcttcacgatttggcagtctgcgtggcggcgcttcatagaggctaaggaagaaagaactttcatggtgtataactccggtttggtgttcggttcgggagacggaatataccggttagttaagaattgtaaagtcatttctttgccaaaagtaagatgccgtctccgcagagatgcttttatgaggaagatgcagtaaagcatgggatggctttggattccgcgccgacggaaaaatttagggaagacgtcatttagccgggaaaataaaatgcgggaagggacctctgccgggggaataaagggtttgtggaccggaggggattcgtataacatcttttccggttttccttatgactgattcttcctctcctgattcctccccggcttcccggaatacgtttgcccatcatttgggaatgaaagggtttctgctcatggaagggctgttgaagctcgtgggcatgaaaacgctgtaccggctggggcgcgcggcaggggccgtggcgtggcatctgcttccccagcgccggaacattgtggaaaggaatctgcgcatcgttttggatccggccctgcgcggaaaggaactgcagaaattaagccgggaaaatttcaaaaggaccattgccaatttcctgtgttccgcgaagacggccaccctgacggatgagcagttgaagcattgcgtgacggtcggagggcacgaacagtttgccgcgcctgtgctggaagggcgcgggcaggtttgcgccatagcccactccggcaactgggaggcgctggcgagaatacgcgcattttacccggaggtggagcgttacgggtccatgtaccgccagtttgacaatccgctgatggaggaatacgtgtaccagcggcgcacggaacgtggaactcagatgttctccaaggagggaggcatcaaggctcccatgaaaatgctcaaggaagggggggccctgggcgtgctgagcgaccagtttgtatgggagggggtgtatgtccccttttttggcaaggtgaccggcacgactccgctgcccgctctgctgagaaaaagggctggcgcggacatggtggccatagcggtgcgcacggatgctcccggccactggatagcggatatggggaatgtggtggatttttccaggtcggacggttctctggcgggggacacgattgaagtgaacagggggctggaaacgttgatccgggaatccgtgctggatgtgttctggatgcaccaccgctggaaatccgttgaccgatttgccccgcaggataaaaaaacggctgcgatcctggaaaatatggagctgaagccgtaccgcattctggtagccgttcccagggcgctggatgaagccctggcgactgttcccctgattcgtgctttgaaaaccgtccggtgcgacatgcaggtgaacatcgtctgcccgtctgcccagctggggatatggaagacggtgccggaagttacccatgtgctgccgcacgactccctgaagcagcttcgggaagctttggcagcagatgaattttacaatgacggaccgctggatttgggcgtcatgctggatggagatatggaaaccctgaaagcgctggaaccgtatggccccatgatgttttccgggctggacacgcatcccggtgcccggaagtacaaattccgggtaaaggcccccgtcctgcgcgccgcccccccggcgcaccgggtgcagctttatctgcaattgggggggctgcatgggctggatgtcgccaccccgtctttgttccctgtgaaaaaagcggccccggcggaagacgcccccattttaatcgctccgttttcccgcctggggagcgccagtgaatggagctgggagcagtggagggagctggtttcccttctgccgggacggacggtgctggcggctttggaagaagaccgggagcgtgccgcctccctggcggaacatttgaatgtggagctggcggtgggtgcgccggaggctctctttcccgtcatggacgtcgctgcggctgcagtagctgtggatggcgactttccgtccctctgttctttccgggggcttccggtggtgactctgttttccacccggcttccggatgtttaccgccctatgggcacattcaaccgttccctttacagccaccagtgctgttctccctgcttccggaaggaatgtgaccgggatgttccctgcaaccgccacattgccgtgcgggaagtactggaagccttgcgggaaatttccgggaaagaataatctgggaagggacggaatgccgccccccggcgttggcggaaaaacggcgggaatgctgccgttgccgtaaagaatgatggaataacgaaaggaattgcggaaatgccgtattccggagcaattccagaaatgcgtcttcctttttgcatggattctgtagtggagggaagagggcccctcatccggaagagggggatgcctgcgtccggtttgctgcggttggtggcgccaaagcgcgaaaatccggttaatgcacgcaatccggaaagccgccccgccggaaaatgccgcgaacctgttccgccagttctgcggacgcttccgggacgtccttcaaagtatagtccagcttcaattcatcccatttgaatctccccagctggtggaaagggagcacgtccacacgttccacgttgcccagaagcgccgcatggcgggagagttcctcaatttcttccagattgtccgtaacgccaggtaccagcacatacctcagccacacgggcttgcggagggaggccaggcgttccgcaaactccagtgtagggcgcagttccccgcctgtcagggcgcgataccgtttcggattccatgccttgatatccagcaggaccaggtccgtatccgccagcatttcttcgcccgcattcacgcccagatggccggaggtgtccaggcaggtgtgcaggcccagtttccggcagcctttcagcacggcaccggtaaaatccggctggaagaggggatccccgccggagagggtgacgccgccgcccgccgcctgcaaaaaatcccggtaacgggctatttccttgaggacatcatctgcgctcctgagccggcccctccgcacgtaggaggtatccggattatggcagtagcggcagcgcaggctgcagccggacaggaaaaggacgaagcggatgccggggccgtccacggtgccgcaggattccacggaatgaaccaaaccggtgacggagctttctccgtccggatcatggttttgtggaaaaacctgcggcatccgcttgcagtccgggttaacgggtgtggaaagtgcggttgatgacctcctgctgctgttcccgggtcagcttgatgaaattcacggcatagccggaaacgcggatggtaagctgcgggtatttttccgggtgatccatggcgtcgagaagcgtttcccgttccagtacgttcacattaatgtggtgacctgtagcggcaaagtaggcgtccagcagggagacgagcttgacgcggcgttcacgttcctccttgcccagggcctgaggaacgatggagaaggtgtaggagatgccgtccagggagtcgtcataggacagcttggctacggagagcatggaggccacggctccgttcctgtcccttccgtgcatggggttggctccgggggcgaacggttccccggctcggcggccgtccggcgtgttgcccgtctttttgccgtacaccacgttggaggtgatcgtcaggatggactgggtgggcagggaattgcggtaagtgtggagcctgcgcagtttttccatgaaattgctgaccaggctgcatgctatgtcgtccacgcgcgggtcattgttcccgtaacaggggaattccccttccgtcttgaagtccacaatcagcccttcttcattgcggatggcttttacggtggcatacttgatggcggacagggagtccgccgccacggaaagcccggcgattcccgtagccatcgtgcgcagaatttccggatcatgcagcgccatttcaatgcgttcatagcagtatttgtcgtgcatgtagtggatgatgttcagcgcgtcaatgtaagttttggcgagccagtcctgcatcttgtcgtacagggccatcacctcatcatagttgagaatttcctccgtgtagcggggggagggcggggccacctgcttgcccttgagttcatccacgccgccgttcagggcgtagagaaggcacttggcgaggttggcgcgcgctccgaagaactgcatctgcttgccgatgcgcatggcggacacgcagcatgcgatgccgtagtcgtcgccccaatgcgggcgcatcaggtcgtcgttctcgtattggacggaggacgtttcaatggaaaccttggcgcagaagcttttgaaggcttccggcaggttccaggaccacagaacggtcaggttcggttccggagccggccccaggttgtacagggtctgcagcatgcggaaggaactgcgggtgacgagggtgcgcccgtcctctcccatgccgccgatggattccgtcacccaggtggggtctccggagaacaggttattgtaatcaggcgtgcggatgaaacggacgatgcgcagcttcatcacgaactggtcgatgatttcctgaacttcctcttccgtgatgagcccctgttccaggtcgcgggtgaaataaatgtcgaagaaagtggaaacgcggcccagggacatggccgctccattctgttccttcacggcagccaggtagcccaggtacgtccattgcacggcttcgcgggcgtttgcggcggggcgagtgaggtcgcagccgtaggaggcgcccagctgggcgagttcttccagggcgcgtatttgttcgctcatttcttcgcgcagacggatcagctcatccgtaaggggggaatgttcacggtttttgaggtccttgcggcgttcggcaatcagcttatccgtgccgtacagggccacccggcggtagtccccgatgatgcggccgcggccataggcgtccggaaggccggtaataatcccggcggaacgggccgcccggatatcggaagtgtaggcgtcgaaaacgccttcattgtgcgtcttgcgtatctttttgaaaatgtctgcggttttctcgcacatcttgaacccgtaggattccagggcctgttgggccatgcgcaagccgccaaagggcatcagggcccgtttcaggggggcgtccgtctggaggcctacgaccacttccagttccttgtcaatgtagccgggcttgtgggatgtgatggaggataccacttcttcatcagcatccagcacgccgccgttgtctatttcccgtttcagcaggactttcagctcgtcccataaacgaagcgtgcgctgggaggggccggaaagaaactcttcattgccggaatagggcgtgtagttatgctggatgaaatcccgtacgtcaatggactccgtccatgctcccggcttgaatccctgccattcctgcggaagggcggtggactccttcaagtcttttactatgctgatcataaatagaatgtagtgaagaagactggagaaaaacgttccgcagcccctgaaaggctggaaacggcaaaactccgcgccgcgtaattatatcgtgaattccgggggacaacaaggctaattctttgcgaagagaacgcgggtgcgctggctttggcatgtttcacctgtctgtccgttgcggagcggaaaatgaggggaacatgcgattgcggaaaagtgacggaagattatttctctttactttcctaatctctattgcagtatctcaacgcttaccgttatgaaatcttatgcatgcctttgtttattgctggcgggagttttttgcgttgcttgtttctccggtgcctgtgctgatgaattgccgcccacgctgaagccccaggtgaacccgagggccgtgtatgactggaaaaaacgccatgaagcagtgatggagcggaaccggaccgtcaaaccggaatatgtcgtctttggtgacagcattacccaccgctggggcggcgagccttccggggacaacagggctctcggaacaggaaaaaccgcctggcatagcctgttttcttcccatgcggtaaccaatatggggtttggttccgattacgtggataatgcctattaccgcttgcagctgggagagctggacggcatttctccgcgggtcatcatcgtgctgctgggaaccaataatcttggcgggcggaaggatgctccccgggcctgcgcagacaatctcaaggcttttgtgagcctggcgcgccggaagtgcccctcttccaaaatcctgttgctgggcattctccccagggaggaaaaaaagctggctcccctgattagggaaaccaataaaatgatatccggcctggctgacggaaacagcgtgtttttcgccaatcccggcgaggaattcctgggggaggacggagtgtccccaaaacccgggctgctggaggatgggctgcatcccagtgccagggggtacgacatactggggaagtcgttgagcgtattgctgaagaaaatggacgacaagtacggcaagctgcccgctccccggtagatgaatacgggggagggcgttcctgttccgggagaggccgggggatggatgaaatggagcgcgccttggaagaggccggacacggtgctcgcctggccgtggttgcggcaggatttgccggacgggcagtggtcttttttactctgccggaggaagtgacgcctgcgatcttgatgcacggcagaatttgcttaaactgaaaaccggttttactttttgattatgaatttcctctcctacatgctcgccatattgctggggagttccagtctggcattttctgcgccttccattccggcctccgcgttgcccgctaccctgaagccggagccccatcagcgggacccgtatgattggaatgcccggcatgaagccgttaaaaaaagaaaccgggccgtcaagcctgaatacgtgatgataggggacagcattacccaccattggggaggggagccttccggggacggaaaaaatacgggatcggggtcctgggagaaattattcggtccgcatgcagcgacgaatatgggctttggatttgattatgtggataatgcctattaccgtgtccaaaacggggagctggacggcatttctccgcgggtcatcattgtgttgctggggaccaataatctggggcaccgcaaggatacgccgcaggcatgtgcggacaatatcagggcatttgtccgcctggtgcgccggaagtgcccctcttccaaaatcctgttgctgggcgttctcccacggaaggagaaaaacctggcggaaccggtgaagcagacgaacagactgttggcggaactgcataacggaaagaacattttctttgccgatccgggaaaggcgcttctttccgcagacggtgcttctccgcagaatgaattcatgaaggatgtggtgcatcccaatgccagggggtacgaggttttggaaaaggaactggccgtactcctgaaaaagcttgatgcaaaataccggggagggaagcaggcgggaaagcattcctgatgatcgtcttctgatggaaggtaggattttgcttgaagggaaagccccggttgaggaaaatatacggcctttgatatttagtttatgaaaaacctgttgtttgcattgttgaccggttccttttgttgctgttatgcccaacagaaggccgcacccgttccggaacctgaagttgtcgccactccgccggctgatgcggggcgcggccttatccgtgtggactcccgtgaaatacgccattattccggtacccgcaaggaaccggattacctggtcagcagggataacggaaaaacatgggaaatgaaggccgctccggctggctaccctcccaactacggtggcattcccaaagaatctccggctattgtgcgcaaccctctgaccagggaattcattcgtgtgcagcctatcggaggctttgtatttctttccaggggtgggctggacggcaagtggcttgccgtcacgaatgacggcaaactggaagaagactggaaagacccggaaaagaggaaaaacctgaaaaaactgggcggcatcatgcggacccccgtttttgtgaacaagggccgcagggtgatcgtgccgttccacaacatgggcggcggcaccaagttccatatttccgatgacggggggctgacctggcatgtatccaggaacggtgttacttcccccagacatgaagccaggcccccccaccagggcgtcagatggttcaacaatgccgtggaagccacggttttggaaatgaaagacggtacgttgtgggcgcttgcccgcacctcccaggaccaggcgtggcaggctttttccaaggattacggggaaacgtggagcaaaccggagccttcccgctttttcggcaccctgaccatgaacacgttgggacgcctggatgacggaactatcgtttccctgtggacgaatacaatggctctgcctgaaaacgccacagctggcaacggaacgtgggaggatgtattcaccaaccgtgattcccaccacattgctatgtccggggacgagggcaaaacctggtacgggttccgggagattatcctggacgaacaccgcaaccatcccggctatgctacgctggatggtccggaagaccgcggcaaacaccagagcgaaatggtgcagctggacaaaaaccgcatccttatttccctggggcagcataaaaaccaccgccgcctggttattgtggaccgccgctgggtaggggccaagacgcgtgccacgcagacggggaaagatttggattcccagtggaccattcacacttatatcccccagaaaaaaggccattgcagttataaccgcaagccttccgccgagttggttcaggatccgtccgggggcacgaagaaggtgttgcaaatcaagcgtctggatgatcccgaactggtcaatgaaaaatccaatgtggattaccggaacggcggagctacctggaactttccgaacgggaccacggggctggtcaaattccgcttccgtgtagcggacggggagcaggcggatgattccggccttcaggtctctctgacggaccggctgttcaatgcctgtgattccactacgaaggattatgccctgtttaccttcccgatcaggctgaaacctgcgccccatctgttgctggggatgaaaaaagtgcctttcacgcccggcgcgtggcatgaaatttcccttctttggcagggtgggcaggccgtggtgtctctggacggaaagaaggccggaacgttgaaaatggctaataagtcccccaatggagccagttatatccatttcatcagcaccgggtcccaaccggatgccggcattctgctggatacggtgaatgcccgggtgaagtaaggagcggtgggattcaatggttttccttcttcggaagcggcggagcgcttaattccggcaggtatttcagcaccatctggagatgttcgtttgaccggttgcctatcctctggagggctgtgcgtccgtatttgtctttcagggatgggtttgcgtggtggtccagcagaagacgcgcaatacccagtttcagccggtccagggaatcgtctcccagcagcatgcctcggcagcatgccatgaggggagtttctccggcggcgttttgatggttgacgtcagctccctctttgatgaagagattgaccaggtccctgatttgagggaggcaggacacatcaatgaaagccagctggcggcacaggttcagcagggccgtgtctcccgcggtttccggcagggtggtggacgcgggcatggccgcattcacgtccgctccgtattccagcagaatatgtgcaatttgcagtgcggcgttcggagtgttcaggttcagggaaagaaggggcggggccatttccccgcggaaattgggatcgtacccggcttcgcaaagcttgcggaccagcagggggtatccggcggccgtggcccatgtgagcagacttgtttttttacctttcaattcaggctggagggaaatatccgcaccgcatttcagaagaaacagggctgcttcctcatagggtgctcctccaataccggccacacaggtgatgacgaggggcggccagcccagcagccccggtttattcacatccgcaccgtattgaatcaggagattaaggcaggagatcctgttatgcaccggcaggggcgtggagtcgtccatgcctggctggcaggcgtaagtcaggggggtatttccctgttcggagtccggaatggagggaaaggcctgttgcggcaggatgatctggacgttcgggtccgcatggcgctgtaaaaggcggttcagcaactgcacttctccgagcccggcggcaagatgcagcagggtttcatgggatggagtgatgcagcgtccgtctgcgctttccgccgtgtcccgtatcatctgaagccgttccctgatttcgtccttcatatattggcgcatggaaacttcggaaaacatgtgccagtcaatatggcgtgaattgagggaaagcccgcggtaaatgaaacgttccgggcttcgatgggctgtgaagttcgctgcggtaagaatttgttctttttccgcttttgtccagatagggttgaaattccattccgcgggagaagaatcattcctgttcagccagaaaacggcgaaagtcgcggcaagagaggcaaaaaagctcaaagctccaagaaaccagagagttttctttcttaaagtcatgtgtatcataagcaggggtactgcgaaaggccatgatgcaggaatccataactccgggcaatgaaaaaatagtatgagcaaagaatgcccggggcaaaccatgtgggaattcgggtggcggattgcaaattcggatacaattcaaataattggagttaaatgatccacgccataaactccataatttttgtgaagtccggcccatgacaccatattttccgtttccttcgtaattctctttatccacgagcttttttcccagatgaagaggaaaaaaattctcctccgaatttgcaattcggtgtgatacgctaaatattgcggatgtgcggatggtttcaaattatttgcatttgccgctgctgcactcacggtagaatgaaggaagctgaaacttatggaagaaatggagattcttccgtaaaatgatggagagaactgtatccttgctgctggcctcctggtctttcctttcgctgtccgctccatgctgtctgaagccgctcttgccctggaagtaaggataaacgatgattctggcagcgttatggattccgtcaaacttattgcgtccgatatggatgggacgctgcttaatggaaaaggtgaattggaccctgcgttttttcccttgtttagggaacttgagcttcgcggcattcgttttgcggcagcaagcggccgccagtatgacggattgctccggacctttgcccccgtggcggaccggatgctgtttattgccgagaatggcgcttatgcggcggcgggtagaaaagaatggctgcttctggacatggatcatgaaacggtagccggtttgattgccgggatcaggcgcattgaaggaacctgcatcgtcctcgcagggcgggattccgcatatattgaggacaaacagccggaattcgtccgggaggcccgcaaatattacacacgctgtcaagaagtgggggacctgctggacgtgcggggggacaaacttttgaaaatagcagtatatgacttcctgggagccggggaaaacagttttccccggctgaaacatttggaacatggcttccaggtggctgtctctggagagaaatggatggatatcagccggaaaggggccaataagggggccgccctggaattgattcagcggaaactgggagtttctccggaggagacgatggttttcggggatcagatgaatgacgctccaatgatgcggcaggcgcgtttcagttatgccatggcgaatgccgtgccggaaatccgttccatggccgcatttgaggcgccgtccaatgaggaaaacggagtgatgcaggtgcttggaaagatgttggacgcccattctccgcagggaaggtccgggaattgcaggaaaccccgtttctaattgccgggtaatggaataaaatcagggttatgttgatgttattgtcagatttttttaatatgctggcgatggccgtgttcgcttgcattggcggtgtttttctgggaatgggctttctgctgcttaaattggcgggaatttttttcggaatattggcggggtgtattattctgatggaagcggccggaaggtggatttcccatttgatgggggcgtgagtccgttattcccggcaatgaaggggattcctgtacgctttccgtgaggggagggctttctgatagctgggtcattgccggctgctgttgttgccggttcattgccgaatgctgaagtggaaggctgcatcctgcctggattctgcgtgttaaaaccggatagcggagttttgtgataaacagacgtttgccgtaagatgccctggaagacagagccccgcagaaaggaagtcccagggatatgaaatgccgggcgtccccatggaagggactgttgcctttgtactatttgacagggcgggagacggaattttaccgtccctcccgtcagcatgaaagctgttgtcctttttagttttgcttttccgcaatgtctgtggtacacccgtgccagacgtcatgaatcaggaatttttttcagtgctcgtgcaggtggcggccgccctggggctggccggcatgatcttgttgctcagtatcttgatgggcaagcgttcttccgtgcgtaaaccggcggacattccctacgaatgcgggatgattcccatgggggaaggtgcccccatgttctctgtaaaattctatatggtggccatgctctttgtcatttttgacttggaagtggtattcctctacccctgggccgtcaatttccgggactatattatgatgaatccggaatcgttcacggccatgtgcattttcattggcattttgctggtggcctacctgtatgcgctgggcaagggtgccctgaactggcaccacgatccccgttgaccgtttttgttcccttttaccaacgccgtgttccatgaggagtacggcgttttttatgtgaaagaaaaattgccttggaaaatggcgggggagaaatatccgtaaatcctgtcctttttccggatgcctgtttgcgtgtaaaatcatattgtacaaaagatgatttctcttgccagaagagtggaatagggatagcgtttgcgcgatcaggaaattcatcatgaatatgcctcttcctaaaacgacgcaaggtgtttatcgtctgtcggtcagtaccttttattttcttcagggtttggtgttcgccagttgggcatcccgcatcccggacatcaaaagtgcattggggttgaacgatgccgacttggggtccgttctctttgccgtcccggtggggcagatgtccgccatggcgctatccggttacctggttggccgttgcggcagccggaaaatactgatggcggcatccgtcttttatcctgccgtgcttgtatgcctgggtatggcggggtctttctgggaactggcggccgggttatttttctttggggtagccgcaaatctgacgaatatatccgtcaatacgcagggagtgggagtggaacggctgtaccagtgcagcatcatggcccggttccacggtttatggagcctggcgggttttttcggagctttgctgggagctgccatggtggactggcatatttctgcggaaacgcatttcatcgccattttcctgatatgcatgattattctggccgttttttccccctctcttctgccgagggatgcccggcgttcctcctcccagggaggcggtatgttccggagcatggatgcttatgtactggtcatcgggctgatcgccttcggaagcatggtgagcgaaggaaccatgtttgactggagcggcgtgtactttgaaagcgtggtaaaacccggtccggggctggtgcagatgggatacgtggcattcatgagcaccatggccctggggcgttttacggcagaccgcctggtgatgcgcttcgggcctgtgcgggttctgcgcgccagcggcatccttattgcctccggattgctcgtctccgtcctgttcccgatgctgtggtccgccacgctgggctttctgctggtgggttttggcacctcttccattgtcccgctctgctacagcatggccgggaaatcccggaaaatgattcccagcatggcgctggcttccgtttctaccatcggctttctggggttcctgatggggccgccggtcattggtcatattgcccatgcttcctccctccggtggtctttctccctgattgccctggttggactggggacggcattcattgcccctttcctcaagaaatataggtaatcactgttaatgatatgcctatattgtgaaatggtgcgcctggcaggactcgaacctgtacgcctttcagcaccagatcctaagtctggcgcgtctaccaatttcgccacaggcgcaacgaacgggcggacgcactctgccataccaggctctggcgttcaagattaaacaggagtttttacctttgacgcgcttgtgggaagcacctgtggtgagaaacccataggaaagttaactgacctgttgggtgtctgctttctggcggtattttccattcatgggcggatgtctggttccccaaaggcacatttactccggattagaaggggggggcattgaatacgtcctggtttgtctgccggtaaaggatggaaaatccttggtagctgattctgtgaaggaggttctggagaaaggaaagttttatcccaagccggtgttggccgccggtgatggttccggggcgcagtgtttcgcgtatgaggagtgcgatactgatgccaaacaacgaggcgtggaattaagaagattctcgagccagttaaagcagtcctgaaccggaggatggaatatcccagatattttcccgggcaggcttatcccatgatttgtgccggaaaaggaaatagtttcacgaacagaaagtccagcatccccaggcacagggcgatgcagacggcttttttaggggacaggagaggcgttgttttcagccaggcgacgatgccggcatgaaccgccagagagatgcccacagaccaccagaagaacggaatgcccgttatggcgaagagagccgccagcgggtaggtgaatgccagaaagagtttcatgacagcttcccattcatgcccgcgcaccatcatcagctgcttggacagaagagagacatacaggcaggaagggactacaacgcacaggatgagggaaacaacccctttttttgcataccgttcttcctgtgtgggaatgtacatgccgcatatactgggtcaggaggggaaaattgtcaaacattgtcctagcccggcggggcgggagcaatatactgacggcattgcgtatgtcgtcttttgagttgaattcctccttcaagccttccggagaccaggagcaggccatcggcaagctgctcaagtctctggaggcgggtaacaagcaccaggggctcctgggagtgaccgggagcggcaagacattcaccatggcgaatttgattgcccggatgaacaggcccacgctggtgatttcccacaacaagacgcttgccgcacagcttcattcggagctgaagagttttttcccgaataacgcggtggattactacgtttcctatttcgattattaccagccggaggcgtatatcgccagttccgacacctacattgaaaaggattccgccattaatgacgagttggaccgcctgagcctgaatgccatgaattccctgatgacacggagggatgtgattgtggtggcatccgtttcctgcatttacggcctgtccactccggaggattacaggaacctgacgctgcgcatgcgcgagggggatgtcatggaccgggacgtgtttttgaagcagctggtggaacgcctgttcgagcggcaggattttgattttacccgcggcacgttccgcgtgcgcggtgaggtggtggaggtgtttcccgcttattcggaaggtgaagcaatccgcgtagagtttttcggcgacgaggtggaacgggtttctttgattgactccgccaccgggcgcgtgagggaacgacttgggagctacacttttttcccggccaagcagtatgtggccgctccggagaaacgggcggcggcgttgaaagctatccgggaagagctggaggaccgcgtaggctggtttgagaagcatgggcgcctgctggaagcgcagcggcttaaattgcgcacggattatgatttggaactgattgaagagctggggttctgcaaggggattgagaattattcccgccatttgtccggccgcctgcccggaagcgctccatccaccctgctggatttctttcccaaggattcattgaccctgattgatgaaagtcatgtggcggtgccgcagctgggaggcatgtacgagggggaccgaagccgcaaaaatattctggtggagcatgggttccgcctgcccagcgctctggataacaggcctttgaaattccatgagtttatggaaaggcagaaccagattgtgtatgcttccgctactccggggccatttgaactggtaaattgccgtgcggataataagacgtatattcccgtgcgccgtgccgccagatccggagaaaaggctccggaagggttcaaaggaattttgtttacctctcccaaggacattcgcgttgctcccagcccatccacggaaccggtagaaaaatttgacccaaccaggcgttctacacccctgattgtagagcagattatccggcctaccgggctgctggagccgaagattaccatccgtccgttgaaagggcagattgacgagacgatcgccatgtgcaatgaacgcgttgccaaaaatgaacgcgtgctggtcacgacgctgaccaagaagacggcggaagatttgacggagtacctgaaaggggtaggattgaaggtgtcctatattcacgcggatgtggatgcgattgagcgcgtggagattttacgtgctttgagagccaggaagatagacgttctggtaggcattaacctgcttagggaagggctggatttgccggaggtttccctggtgtgcattctggatgcggacaaggaggggtttttgcgcaatgagacatccctggtgcagacggcgggccgcgccgcgcggcatttgaatggagagtgcgtcttgtttgcggatgtgatgacggattccatcaaacggctggttgagctgacggattaccgccggggtattcaggaaaaatacaaccgggaacacggtattgtcccccaaacggtgagccgttccgaacaggggcagttgaagttgtacgcagaggatgatgaagagtccttccgcgtagcggaggatgaagccgggtatggtttggaagagcgcattgccaggctggaggcggaaatgaaggaggctgcttcccatttggaatttgaacgcgccgccttgattagggatgaaatcaggcagatgcgcggagaatatggaaaaggcaggggataatatccggcgtgatgaattggggatgacctttctggtaggatggcatgctgtttttccgtgatatttgcccatcttattcttggtcgtcatttgacggtgatttggatattgggtttaacagttaattgcttaaagaattctgctgatgtgacgtcagtgttccggaccggagtccgctgtcaacgtgaaatattctaagaaggccttacgccgatggggaagtatatgaagggctctttgttccagtcttttcttatatataaaaatttctcatgataagcacttgccgaagtggcaaagggtatggcggatgacagaggattcccaggctggcagcagtagctgtctgatcattctttgccggttatgttccccattttatttcttgatgcagccggctgcgtcaaaggcgccgggcaatgatggtcaggaagggcccatttgccatcgtctgaagaaaagatttgcataaaaaatacttgcgtatttggaaaaagcctgtaatctctttccaccatgacccgcaaaggtggtatcaataaaacccgcaaggcagtcgccaagcgtttcaaggtaaccggcacgggcaaggtactgcgccgtaaacagggcaagcgccacatcctccagaagaagtccagcaagcgcaagcgccagcttggcaaggtggctctggtggacgagacgcaagtctgggcagtcaagcagaacctgcctttcgcctaaaccgcggaaacgctcgactaatgccgagctttccccccgctgaacggggggccttcatgcagccttcttccgatgagaagataagaacaggcgagactgcagggaggtgaggaagaacagtctgttcaagatagaaatagaaataagctatgccacgtgccactaatggaccggcctctcgcaagcgtcgtaagcgcattctcttgcgtgccaagggtttccgcggtttccgcagcaaactcttccgctacgccaaggatgctgtttacaaggcttggcagtatgaataccgcgaccgcaagcgtcggaagggacaattccgccgtctttggatcgcccgtatttccgctgccgtccgcgaccgcggtctgacctattcccgctttatggaaggcttgaaagccgccaatatcgatttggaccgcaaggttcttgccgatttggccgtctctgacgaaaaggcttttgacgctatcttcgctcaagcgaagaaggccattgaagccaaggatggcgccgctctccgcgcctgaatgtgcgggagtttccatctgttcagtaaacgttaaccgacagcctccggaaataattttccggaggctgttttcatgtccggatatggcagttccggccgttggtattttcctgtaaatgccttatggagcaggtgttcgcacgttcatcatttagtgcgccagccagtttctcttattgcagcgtcggttttcccatgccggctgggaaaaatcctgtttccgccagtgcgcatttttgttaagaacacaatggctctttaatcattgcttccaattccggaggcatttattgcaaaggctgttcaggggattcggacagaaaagcgggctgcggcgtttgatgccccgccggtttttctcctggtaaaaaaggcgcttttattcgtccaggttccgggccgggatgatgcctcctctcccagaggcaccgctcgaaaaaaggggacgcggtcttttacttgcggcttcaaaattcccggaaggtaaaggctgttttttgggctatcaggcaccttttgaaagggtattatatactttagttcggaaagaaaatcatctctccaaatggtatttttcttagaaagaatttcgtgagcgcaagcccatgattagccagatgtttttgtagttgccaatttcataaaaattccccattaataggtagtaaaaaatacaattatgaaaactactaatcaactcatagatattattcgtgctggtggagggataaggattgatgcatctacaaaaacaactgaccaacttgttgatattgctagggctgcatctaacaaaatggttcatttgactcttgcaaatgcgaatgcaaaaacaactgaccaattgattcagattgcccgtgcaggaaaaggttgtgtcgtttttgattttgtcaaataataagaaattggtattatttcgaaaagaaaagcactacctcactttttcatgaggtagtgctttttagtttatgtattagaagaaatatcaattataataaattacatgcacttgaataggattttgagtaaataattttgatgtttcatttagaaatgattgaccaacatcaaaatcttcttctaatttctttacttttattttctttattttatcaagaacactatttgataactcaggtttgcaaaaatcctttaatgctctctgataacagatttttttcagatttgtatcttgtccgcctagataaacaagatactctatcttcaaaaaaattaggcataagaaaatagaagggaaaaacaaaagtaaggaaaaataatggacaaaacaattttgacagtccatgccaatcacaaaaatagctataaatgtaaaaatagaggaagtataaatcaaaaatttaaaaagactttctatttcttttctcattgtttttctataatgcttccaaaaaactctttttgacttttcaatcccctctggagttttaataaaatctcggatattattcattatttgcggattaataaaaataatatctttgattaatatattttccaatctctccttagtttgttttctaaccgtagtatagattgatgttaatgtgcatagtgtaataactgtctgcaaagttgctaaatgaaaaccgttgccttgaagatgttcttgcgcaaaaaatattgaaagaacaaagaaaacgcaaatcagtaaaaacgaatatacgcccacacctacataaaaagaccatctcaacataggataataaattaagaagcgtgtcgaatattctctaaagccaaattaagtttatttactgtatctttatcatcccaagaagctttagctttgcgtttatcaggagcatactcatatcgaaacattctgtcatcgacagtacaaacattagcggataaacctactcccttttttgtttgataatcaaccgagtccttaaacttacaaaataaattaatgagcttagaacttaatgcatctgcttgttcagcctgaatcattactgtaaaacggacgccttttttgagagcgcgtttaatagctaaaaatacacccttatcagcataaatttcatggttcaagcttcgagcaaaaatacgaacagaaaatgtggccgcattgatgaattgagctaaaacaatttttgcatcgtctgtagaatcattataaaaatacgcattctttggtgcgtccttcataacttcaacataagttctatacgcattattagacatgatagattacatggagttagaacctgacgcgcaggctatctttttttctaaaattatcaagcttttctcgcaatacgatgcacaatttagaattatttatctataagaattacacttagtatcgggatttattccctttctgtcaagaaaggtaaaactctatagatttgactcataataaaccatatctgttcattaaatgtcgcgaaattactcgtacgtttcatgtgactttctaacaaataataaaaatcatttagtacatcttattgtaggaatttaccttctcttctaccgccctcaaaatcccttcctccacagacaacccttccttgacggccctcttgactacctcattcaaaatagagtttttcattcgaacggcaatttgagattccagttccgaaggataatcggcactcattaaatgacgcaaggtgttctacacgttgaaagccctagatatctagacagctactcatttcccagcctttctttctaattacacttattcccctccacaattctcttcgccgccccttctgtggcccacaccacaaattcctcaacgctcatgtctttctgaaccgccgcacgaacggccaaattgagaattttgttagggataggaacgctcagctgagaaacaaaatcgttgttagatgctggctcccgcccctgcatgtaccgagaaatcagaatctggacgtgctttggaatactacctttggaaaaatagttgtcaatggtgcttctggctagacctagggaggaagcaagttcagtgcgggaaactttgttctctgccaaccaccttcccaacgtctgaatatccagcgggcgtttctcgtccatgcgggcaattttctcctatcaggagggtgaatgaaagaaatcggggtatttatgattgacaaaatcctattaggataataatagctcttttataggacaatattatatcttaataggagaattctttgtcctctctaaggaatccaaaacctaaaacatcatgaactcgaaaaccatcattgccagtttggggcttctgggcctctcatgtaccgcacacgccgcctctagtgacccttgggaatactataggatgggaggggactatcgttctgcatataccaccagatatgattccacgtttgggggaagtttcaaaggggtctatgcatgggcatcagaagaagaggacccaaatatgtacggctttcaagttaaccttcatacaaatattgaaacgggttcagtctttcacgaactatctataaactcagggttgctttatgggtcaaaaacttattttggattattgaagcttgaaactatgtctgttccattgatggcaggctatgcattgaatgtccccttatctgatatagcaaccttctatataggaggcaaagcaggagtggcctttgattctgccagaataacgattggcaatatcaaagtaagcgataatatgacggattttgcctattctgctttggtaggtttcaaatttgcagtttcggaaaaagtcgattttataattggttatgaaatgtataagattgaagatattaggccctaccatgctatgacgataggcattagctggtcattctaactttcggcggtgaattaactggcctccttcctttcggggaagggggcgattctttgatttgcatgacttaggccatcaccttgttctcagggtggcggttaattcttcaattcggcgtaagtgattctcgtcgaaaatgctttagccataagagcatccaatctcacccacgtatggattttcacattcccctcattcaaccgatacgcaaattcatctacatatctctgtaaatgttttgtgctgaatgaatggtagattccatagaatcctctcttcaacaccgcccatacgctttcaatgccgttagtatgggccattccgtcaacatactgtttagcactatgattcaccacctgatgattaaactgtgattctttataggaagcatgttcatcagtaaccagaatggaatcccgtcttaaatacttattgagaatctgatggactgtatctcttgaagtatcggaaataaccctcgccaaaacccttcccgctctggctctcattcctaaaactgccgtttttccaacaattccgtgcccagccttcaatttctgagattcatgcttattggattccttgcctccaatatacaccccatcagcttcaacgattccagacagaaaaccgttactgtcatcgtcatcgtggttggaattgcaagcttctctaatcctttgaagcataaaccacgctgttttctgcgttaccccaatttctttagaaagttgcatggagctaatgccctttctggaagtcactactaaatagaaagcaaaaatccacttatggagcggaacatggcttctctcaaaaatagttccagttctaacggtgtaaactttcccgcattccccgcattcaaaatacccctcaaccccattccttttcaccctatactgcttttcgcttttcccgcaaaacgggcaaactaccttatcactccaccgtttcccctccaaatactttttagccgattcttcatcagggaatttttcaaaaagctcaaacagcgaaatagttaagcggtcgttcatgggtgcctccttagtatggctaattaatagcatacggagaaaccgaagtcaagtatataagacccttttgaaatccatttggaatatcagcatccactttgtcattaggacatctttgaagcttgttcaccggagagtcccgtggtagcttgaacgacaaaaactaccatggatagcattctttccgtccttgccaccatcgccattattttcggcgtggtgatgttatttaacttcatgatttttattcatgaacttggtcattttttcgctgcccgctggcgtggtttgtatgtggacaggtttcaaatctggtttggccgtcccatctggaaaaaaacggttaacggcgtgcagtgggggctggggtggattccggccggaggttttgtttccctgccgcagatggctcctatggaggccattgaaggacgtgcggagcttcccaaggatttgaagccggttactcccttggacaagattatcgtggccgccgccgggcctgccgcttcttttctgctggctgtgttgtttgccgtggccgtctggatggtgggcaagccggatgtggagatgggcgtgactacggtcggttttgttgctccggacagccctgcggctcaggccggcattcttcccggcgacaagattgtgaaagtggacggccatcctgtggacaagtgggcgggcaatatggaaggcgtgcgggaattgatcatgctgggcgagcatgaccgggtggtttttacggtgcagagacctggacatgaaggagagatggaaatttcctgcggattccggattccggaaacgtcctggtggcagcgctccggcatgcgtcaggtggggttgatgcaggccatgccctgcgtgattggggaagtgatccccaattctcctgccgccctggccggattgaatccgggcgatgaggttacggccgccaatggagaacgcctctggaaccctgccgcactggatgttctgctgaagaagaatgaaccgctcttgctggatgtgacggacagggccggggttgcaaggcaggtgaatattcaggggaagcttccggagaattggcacaatggtgcggacggttccctgctcaagggggcccagcctattctgggcgtgagctgggacctgagttccgtgggccgtgacgttaccgtccatccttctccgtgggcgcagatcaagcagagtctgaaatggatgggggataccctggcgaaggtggtggctcccggcagcagcgtgggcgtggagcatctttccggacctgtgggaattgccaatcagttttacaagatgttctctctggaggaagggtggaagctggccctgtggttttccgtggtgttgaacgtaaacctggcggttctgaatattctgcctcttccggtagtggatggcggccatgtggtcatgaatgccattgaattggttttccggcgtcctctgaatgtaaaagttctggaattcgtccagttcggctttgtgttcctgctgatggggttcttcctgtttgtgacattcaaggatgtgggggatttctttggcaagaagccggacaagctgcccgccccggtattcaaggccgtcgcggattagttgcggacggcgttttttatcccggcctgttccatgaagcagtcactggcggcgcgttttctgttccgggcggtggtgctggcgtttcttgtgtatgccatgctgcttacctggtggactcctttcactggggatagctttatgcattccgtgttcggggcggaccaccgccttgcttttcagcccgtgctggagcggtgctggtggtcatacatgcactggaatccccggctgggagagttcctcgctatttttacagctacagcgggaaaatggctttttctggccctcaatcccttcgtgctcctttccctggcgttgatgatgttttttctggcgcggggaagaagggtcaattccggaaactggcgggatgtgctgctgtttaccgtgggagcgcttctcttgcttacgtcttcatccaggccggggatcacgatgttctggctgtccggagggaccaattacgcctggtcggccgccatctggctgggtttcctgtgcctgtaccgctccttatgggctggaacttcccggattagggacactcctttttcctggctctggataggcgtcatggcttttgccgccggcatgacgaatgagaaccagattcccgcttccctgggcatgctgttcgtgtactggttttacgcccgctgccggggaatgattctcccccgctggtttttcattggctggggattccatgcgctgggaggggcctttcttctgctggctccgggcaatgcggcccgccttcattcggagacggcgggcggcgcagccgttctccattcctggggggatcgtttcagcgccattccggaattggtaaacgccttttatgaattcatgccgattcctaaaattttgctggccgttgccgctgccgctctgattctgctgactgtggaagcggggataaacgtctggcgggggaaggccggtcggcgtatgtgcatctccctgctgtttattctggtggctcatgccatggcaatcagcttttttgtacgcgtgattccggcatggcacgccatgttttccgccacggtattgatgatgacgggaattctgggattgtacggggtatggatggatgccgagcgaaggctgtggatcccattctgcgtgctgctggcggcggctggtccggccctgtgggtatgctccggatatctggatgcttttccccgtatccaccgccagtgcgaggaacggaaaatgttcatccgccatgaattggaacaaggcaagaaaaacattacggttcctccttatgattctgttcctttggccccttatgtttccgttatgtggcgcatgagcagcggggatccggatgaatttatcaatcgttccgtagcccgttatttggggattgaaagcatccgggtggctgttccggaaccgtgacggctttattctggctgttttacaaatcctttccgttttttatttgaatgtgggcaaatgtccgcggatcaacaatccgatgaatgccaagttgtcttaataaaaacatattttattcatattaaatatgttatatatttctatcatattgaggaaagatgatttatcccaaaaaaataaacgtaatacatgattaagttttcatgatttgccattgacaccggattgttgatccggtttacttcgttttgccatgaagaaatccttgttgtctttagctttaatctcaagtaccttgcttgccgtagaggcggcaacggtgcaaattgatttcggacgcagtgacgccacgacggacggcgtgctcaatatgaattatgatagtgcctccgccgctttgggcagcatgccgggaagcgtttctttggcatggagtacggcagaatggcctgtagcggcagacggccataccaccaccaagacggttgcggaagaagccgattggaaaaaccctttcaatggcagcatgcctttcagcttgggggacacttttcgtgacggtcttttaacgcagacggccgacgggtccggttctttcaccgtaacgttcagcggtcttgccgccggggaatatgccttgtccatctttggaggtttcacaggcaaggatgtgtttgccggtcaaacatggacgatcggaaacgccgatgcttccaatgccgtctggacaagcttcggcacagacgccagcggggactgggccgaaatttcttccgtgacgggcgataattccggagtccttactccggcgaacgcttccacttccagcgctactgccaataaagggctttatgctacggtagagaatgtcgtggtaggggaagacgggacgcttacccttacgattcagggggatgggagcaagggatacggccttacagcccttaattacctttccctgacgcaggttccggaacccgctacggcagcattgagcctgctgggcgctgctgcgctgttcctgcgccgccgcagggactgaccggaaagaacagacctttgttatcaacgccgctccgtaattcacgcggagcggtttttttatttggcgtttttcctttccctgtctatgcagcaggtcgtttctatcccggcctgttggccggagcaatgcctgccccattccggagaaaagccggaatgggaatgaggcgcgggaaaaagcgggaaaaagcgggaaaacggacttgtccgggaagagggagttattgaatggggacggtttccttcaagcaggtggagacgatggtgcgcgtaatgcgttccagcggtattccggtgattctggatacgatgcgggcgtaagcgttcaattggtttgcatggcgctcgcgcagttgctcaggggtatcggcatggtccgtcttgaagtccacgatgcgggcgccgcctccatcaagaatcagcctgtcaatgatgccggaaatccagttattcccgtcaatggcttcaatacgctgttccttcatgatgcgcgccgtttccggaggcgtgaaaagttcgcggatggatgggatttccatgcactccgctacgatgcgttccgcctccgtggcagggtggagagcccacgccggtttgttttcatcatcccagcgggtaatccgttcaaacacggcatggacggcggaaccaagcgcggcggccttccctgcgcctgcgtgtttttctccctggagcggggaggcttcctccgacaggccggaaggggatatccgttctctggccaacggtttttgcggaggccattccagcgcgtttttctccgcgcgtttttgtatgctttccgggaattcctcataccacccgtcaagaccgcgggagtacaggcatgacgctccggattccggaagtatgtcttccgtttcccggttgaggggccggatagaggaacggactactttccacatggaatctgcctccgtttcttccttgtcttcccggtacgggaggataacgtaggtagcccgcttggcccgggtaagcgccacatacagcttgcaaaatccgtcgaattgctgccgggcgcgccattccccgtaaagttcccggaattgcgggatattcatatagacatgccgggagggggccaggacaatgccttccacaccgccctccccgttttttttgataaaatgggtcagatgccttccgtccgcaaaaggtgtatccctgccgatctggggcaggatgacgatgtcaaatcccagccctttggatttgtggatggtcatgatgcggacaattcccgcggcggggtcttcccggcgggtcaggtcttccatgcgcctgatccattcatccagggaaacgccttgttcgtccacctgttccgcctcattctgccagacggccaggcggtcgcggtggaagtccgtcagttccgcccctccccggagcaggcgctgttccagttcctccatgacggcggcgtaaccgtcccgttccagcaggaggcgccattccttccaccccatgctttccgggcctccctgcgtgatgaggggccggagaggggagtgggtgagcaggccgatgacaaaggggtctcccggcatcagcagccagcggaagaagtacagcaggttttttcccagcggagagtccacacctaccggaacgtcgtcacatacttctgcggggatgccgtgatccgtcagccagcccttgatgacaagagcctggtttttcgtactgaccagtatcgctgtttccaggccgcggcgcagggcccctgtacgctccagaatatcggccgccgcctggcataccaggtcgttgttggcggagacgttttccgccttgggcgcctgccagatttgggaggtgccgggacggtcttccagatgaggggcgcaccggtgcgccggatattctccccactgttccagggcggcgggttcgcacccgggcgctgtccgggcatagtcgcaaatatcgttgaccaggtccagcacaggctggacagaacggtaggaagtggacatgccgcgttgttccagttgaagctgtgaagaaacggagcggaaaagctccgggtctccgccgcgccattggtacacgctctgcttgatgtcccccaccacgaaaatgctgccttcatttccggtcttggattccgccagatcatccagaaaaggcttgatgacgtgccattgggtctgggacgtatcctggaattcatccagcatccaatggtcataacggcagtacatgcggtattgcaggtcccgtttgagttccggcgtcatggtgccccctcccagcatgcgcgtaacgtcgtggaacaggaatctccccctgttgcggaccagggaggaatatttgctctcaaacaggagcatcagcccgtgcgtggcgcgggttcggcgcagcgtgtgcagggtttccatgcgaagccagctttggatgagttcttccagagcaggcgtccagaaatcccggaatttttcccgcgcctcttccacggtaatagcccaggcggaaccaccctctgtacggaagcgcacgcggcccagcctggcgtattgggaaaatccgttcaggaagcgcaggaacagttctttgttttttacgccgtttttcccttccgacgcaggagtttgctgaacctggaaaatcagggaatgaaggacggaatcaaattgttccagagagacgggtggcgccagctcctccggtgtgaagcccagcgtgacggggtttccccacatcccggcatccggcacatccagaaaaagttcgtgataggtgcccaggcggcgcatcatggatttctccgcgtctgcggcttccgcgtcagaatccgccccggaaaggaaagcgtcttcaaaatccttccttcgctccctgtttacggagcattcccggtacagggagagcagggcttcacggcgcgccagtttctccgccgtggggtcaatcatactgaagccgctgactcccagctcaaaggtgctggcggaggcaatttgggcaaacaggctgtcaatggtgcagaggttgagtcgcgccaaattctgtaccaggatgtgcagtaaatggaggaagcgttcccgatgcagattttcctccttccatgcctccggagcgccgggccagagaccgggctccccgtccgttcccttgataaccgcccagagccgttctttcagccgcgccgcgcctgcctcatccgtggcccccgcggccaggtctgtcagaatgcggtccttgaattctcccgccgcttttcgggtgaacgtaatggcgatgaggcgttcggggtggttgccgctgttcagcgccagcaaccccaggaaacgcagggagagctggtaggtttttcccgttccggcggaagcggagatcagcatgttggtcaggggcggcatcttagaaaggcaggtggggggtgaggcggaggcccagcagatcctgcaggctttccctccgggaagtcatcaggtccttgaatacgtcataagagggcggtgtccagcccagttcctccgcagtgatgagaccgcgtccttcatgaagaagtttcatcagctccaccgtccaggaacaggcgctgtccagcgcgcattcctcatacccgggcatgggatcgtggagggtgtcccaggaggagattccgatgtccatgggattggcggggagggagtaataagccgcagagggatggcccccgtaggtttccgaggcccacagcacataaacgggtagctgcaggtctttccagcgcgcgtgcgccagcttcccgtttttccggcgtttggtgtagggatgcagggctggggaaagcagggacagggcgtccggccgttcgagcggttccagatgctttttttcacaggaggaggccgctcccgttttgtagtcaatgacccgtatgcgcccgtccgcatggcggtcaatgcggtcaatgcggaatttcatggggaagccgcccagtatccagttttctacctggtgctcaaaggcaatgcaggaccatccttcctgaagggcctgcaaatgctgaacggcgtaaacggaaagcctctgttccatggagcgtttttgcagcagcaggggcatgaggggggaggggccgtattgtttccggaaggtttgttccagtatttccgtgatagcgtcctgaaaggaggctgcgttcatgccgtctttcaggacggcgtgttcccggcagaaacattccagcacgtcgtgcagcatggtgcccagttcgttgacggccatgtcctctttgtccggcaggaattcttcctcattcatgtgcagcgcctcccgaatccagaagcgcatggggcaggccaggaaccttttgaggacggagggggaaaaggccagccctctttccttccacgggtttttgtaaccgggcgccatcgcgccgatgtcctcagcggtcttccagccttccgcgggttgaagatgccagtttccgcgctggtagggcaggggagcgggcacatcgctgatttcctggaaaagccgttctacgcggtgcggcagctccgcctccgggcagcgcatgagcagggaggaaggggtcagaggatcgttcctgctgctggtccgggagagaaggacggtgagactgccttcccgttcgcgggaatggagcagggcggtcagcagaaaactgtcccgggcttttttccggttaaaggaatcaatgcccagggtttcccgcagttcctccggcataaactggtcggaaacgcctccttccggtacggtcccttcgtttagtcccgtgagaataaggtttttttccgggcggaagtgaacttccatccagcccagggaatccagcgccgcatgagcttttctcctgtttctgacgcgcagcggctggaggcatttcatcaggagcaggagagccgtctccgggctggaaaacgcggtggagcgctgttgcagacgcatgagcccggaaaggcaggaatggaacatttccatggcttccgtctccgggccatagatggctgccagggccgggaaccattccatcagccgttcccccagcattcccggttccgccatccggttccgccattccagaatggcctggatggaaggaaaggcgccgggataagcctctttcagcctggaaagcaggtattcttccgtttccggaaggaatttctgctggattttgtccagcgcggcgcagcaaccctgctggccttttattcccagggaggcgcagagcagggaggagcgcgccagggaatagacggggcgcgccgtccccttttcttccagtgcccgccgaaggttgcggagcaggtccatgacaccgcttccggcaaaaggcttcccttccggattgtggaggccccagccgtattggcgaagggctgcgtccagggcgacgttcatgtcaggatcgcaaacgcccagggcgatgtccggcgttcctccttccgctgtgcgggcgatgatgcggcacgtttcttcagccagccgcgccgggttggccgcaattctgatttgaccgtcgcggattgggatggggcgccgggaccactcttccggcagagggcatccccaggaatcaaaggaggcggcttcttcttccggcgcatgtatccatatctggacgggtacgccatttctttccgcatgctggagggcatggcgcagggggggcggcacctccgctgtgcaggccagaataatgtttccacctgtttccctcagggaattcagcagccggggcggggcttccgccttcatggcggtcctgtcttcaagcttccagctttccagttgttgcgtgcattgtccctccagcctttccatgtccttccagcgttcgtctctgcccgcacaggcatggtgggccatgatgcaggagacgccctggttcgccatggcgtgcctcaggttttgcaggctgccggccatttccagcatgctggaaaaatcctccggcatggtgcgtggaaacaggcggggataaaagcggtgaggcgttttccccagggccaggagccacccggccagttcttccggagcggacgccgtttcttccttttcttccatccgggggaactggtctgccggaatgacctggggagcaaagattgcctgtgtacgggaaatggaggcaaggtattccctcagctgccttccggattcccgtgtgggaaccagcaccagatgccgatggaagccatttcccagggaaagcaggcgttccgccacagcacggcaggccggtttgtcccaggatagaaagaatcggttcatggcagggaagcaggattccccggaaagggggaaagcggaaaattacctgggaatgctacatcaggatggcgggattgcccatctatttttttcattattgccggggcggcgcatggcgtgccgtgaggtgagtcggcattgggccgcatgttggcggcgaagagaggaattattttgcctttccggcagggtgtggaggcggaaattcggaggaatggcgtgtttattgttcctggacggcccgttttcccctggttccggtgaccagaagcacacctgtgaagaccagcaggacggagaggactttcatccatccgaagtggtccatgccccacatcaccgctacggatgatgcgatcaccggctggcagtaattgtacatgctgacggcggtgggtttcagcctctgctgggcgaaagacaggcagatatagctgacaaaggtagccagagccaccacataggcaatgcccagccatgtttgtacgggcagggcggaataatggatggaacccacttcccggaaggtgaaggggaggcaggcggctgcggcatacgtaaacatccatttcagcagggtgacgggagagtatctgccaatcaggttcttaaagaaaacaaagtaaacggctacgctgcactgggaagccaggcagagaatgtcccccagcaggttgttgtctcccgggagagccgccgcatgcgcaccgctgccggaaattagcagcatggctccgatggcgctggcgcagaccccgatgatttttttccccgtgaccatttcccggaggacgaacgccgccagaatcatggtcaataccggtgtaatggtggtgatgatggccgcatccgccggggaagtgaaccctacgcccaccgtgaaggccatctggttgaaaatgattccgaacagggaggcgtaaaacaggggcagccgatgcttcctctctatgggttcccttggcacgaaagcggaggccagccagaacaggatggccgctcccagcaggcggaatgtggcgagagaagcggaacttacttctccctgctgcataaccagtttactgacgggagacatgaggccccagatgacggccgccgctcccatcgcgatatgtcctttcagcgcttctgatggcatggtgcggcccgctgcgcggcgggtcgcacattctccgcttccgcaagcggattgcaagagtttttagtacgggaaggagcgtggaatacaggggaaacgtgtctatccggagcatttggaaggactcgttattctgactcctctttccccgtcgtttccggcttttctcctgaatggaaaataacaactccatattgtttccgtcgttaaagttcatttttgtctacttgcccaagccttgctgtggattggagaggaggtacaaaaataactcccccttgggttgatgcctgccctttttcggatatgtgttgatcgtggcgtttttgcccagtgctactgcggctggtcattattctgttcaacaggcatggaaatgccgattttatgttccctgctgttgccgcggagttccggggcgtacatggcctcaatgacggccggaagggcgctgaagcgtcccggacgttccgcgcgcaggcggtggctgatctggtattggcccatgggcagggaggaaaggaagaggcgtatttcttcatcccctatttccctgtagccgaagacggttcccagccgggcgtatccactggcggtttcccgggattcgcagcctgcgggcctgggatccaggagcatgaggtattccacgtcgttcttcgttttcacggtcatcaccacttcaatgatgtcgccgctggcgatgacgtccccgtttttcaacagcgtgcgccgtgtcaggtctctgccctgggagacgagctctcctgcatccgtctgggtgtccttcacggagccgtttttcaccgtttcctttcggatgcggtaataggagcgttccacggtgacggcattgccagcggcggggatggggttttccagggagaagtagctgagcgtggaattggcatagatgttcccgctgccttttttcctgcggatggtgatgacgtggctgccgtccgccagggctttcccgctcatgcggaaagcattgtcaaaggtgaacagggtttccttcgtgcaggaaaccgttttaaccggaatgccgtcataaaggatttccgcctccatgtcctccatgccttccctggtctggaggaggtaggcagacagggcttccaggcaatccgccgtatccttggtggagtcccagtaggaaccgttggcgcggttgtcgagcagccattttgccaggcgcgccgtgacgggattgccgggggcgctcttggacatcagtttcaggtaggccgcctgcgtggctgcgctgctgccgtaccagcgccaccagtatcctgcattgggaaggcgcagccaggcggtttgcagggaatcgtcctgctggaggaattgggagatgacaggcattaccttgttgaagtcgtccatgcgatgggcgtccagcaggatttccgccagttgaatctggctgatgacgggaagttccagcctgtcacggaacaggtagcgttccataggcaggtttttcacgccgcattccgccaggacggagtagaccagggtatccgtcgcggaggccgtcaggcggtaattccccagtttgcggagggcttccttcttttcaggtccgtccggcagttgttccagtttccggaatttgtctccttgttcaagaagagctgtctggcgttcctgatagtttttcagccagcggacagcgccggaaagcatgccttccggcacgttgaccgtgtttgaagcaattttcaggccgtgagccacgtgggccgtcatgacgggatctccctcttccgcccctccgaaccatccccaggagccgttggagagctgtttttcccggagggaggagattcccctggcagccatctttttcagcgcggcttcatcataaacggggttgcgttccagttttttcatgacgctgtcatggaaggccttgttcttgatgtcccggggattcaggctgcgatggcttttcagcgccgctccgggattcaggccgagttgcttgagcgtgtccgtcacgacgagggcggggaggaagcggttgagcgtctgttccacgcagccataggggtattccgccagatagggcagggcctccaccatgctgagggcgatgctgggggagaccttgacgaccagttcgctttcctccctgcgccgctgctgcggcagggaaatggaaagtgtcttttcctgttctccggagagcactgcggcgctttccgcgtggagctgcttcatgccgtgcaccagtacggggaagttcatctgcatggcgtctccggtagagcctgccgccgcttccatggcgacggcggcggttccctccctgacggcggaggtccaccagttgacgaccgtctgcccctgggcgggaacgtccacttcccgcgcggctgaattgtccgaatctgcggacagccccttcacggccggagcgtcagccgggagaagttccaggcaaccgtttttcagggaaatggaaacgcgggcgcggatgtttttgtccgtccggttgcggatcagggcgctgagcatcacgacatctttttccacaaagaagcgcggggcctgcatgctgaccatgaagtcctttgtggtcaggaattccgcggaagcctgccccacctgcaatccgggggtgatgacccaggctgaggctttccatgtggtcagattgtccggcatttccacagggacggcaacgtttccttcttcatccgttttgagcgtgccgcaccacttgatgcagtccgcaaaatgggtgcgcagttgaatatgcggggaaccgttttcctgtacgtccgcatttccctgttcggctgcatgggaatcactttttgcgccttccttgtccgcggccatagccatgaccggagcggcagcgggggctgccgctcctgtagccaatacgcggcctgcggcggcatcaacgccggaatcgagttctgcctccgcaaggccgttgacggttcctttggcctttctcgccatagggccgtaatttctgtagagcagggattggaaatagggctggtccggaccgcggtcctgctgcgttccggaagccgtcatttttttcaggctgaggaagccggtttcgttcaggctgccccatacggttttggcgatttccgtaatattggggcgcgcgatgtattccagagccttgtcataaatggccagggcgacgacgccgtttctgacgggggtgccgtccggacccttgacctgaatgctgacgttgccttgttcaccgggccggtattgggatttgcccggcgtgacggcaggttccagaatctgcccggcgggcggaatcagcagttcggcggaagccgtatgaagttctccgtttctgacggtgaaggcgttgacgcccatattgggcatgtcttcccgggtcaggcggcattccacaagggctgtctgccggtccaggggaaccaggctgcgggattcgtttttccaggagtttcgcaggaaggtccagacgcgggcgtccggataatcagaggtgacgagcagcctggccgtatctcccggagcgtattcctttttgtccggagtgatggaaaggggattgattttaaaaggattctgtttgcccttgccgtaggaaaggaactggaaggtctcttctaccctgttgccgtgcccgtcctccaaggttgtggaaagggcatacaggccggattccccggtttggaaggacagggaggcttccccatcttttccggtggcgatgttccaggtttccagagtttcccgtttgccgtccgcacggatatgccgcaggacgcaggttcctctggcatgggcaattttggcgccatccgccgtggccgcggtaatggatgcctgaaccggcgttccgacgggggcatagccgcgattcagggtggtgaagatattgaacggacggaacgtggcaatgacctgtccggaagcggcaacttcccgcagggaggcgtccgtcacgctgacggaaacgcggtaggtgatgttgctggaggggaaatcccgggcatcctgcgccgtggataattctacggatgcttttccgtctttgttcagcagaaccgtcttttccaggacggtcagaggcgcatccgggaaaaagggaatgctgtacgggctgaaagacctgtcgtacagccagttccatttccagtaaggcgtccagacatccgctcccagcgtcctggtaatcgtgatggttgcctttcccccgcttacggggccgcccgcgtaataatccgcctgaatggcgacgggaatgggctgacccagccggactggtttggcgggagcgtccattctgacggagaattccggctttttatactcttccatccggaaaaggggggcatacagccggaaatccgggtctgcggagtcatgcagtttcagcttggctccgtactggcccagcggagcttccgcgggaataagcagttccagttcaaagctgcctgtggaatccgtcgtaacggtttttggcgggaaaatgctttcatcccctgttggggaggcaatggtcagcgtcagttttttccctgcgcagtcttttgttccgggattcgcgatgtccgggcggaagaggacgcctttgaaacgggccgtctgtccggggcggtacacgggctggctttccaggaaaaagcaggaataggagtcggaggccttgttggccgtatccatgaggtaattgccggattcccagccgtagtcagatattcccgccagcacataactttcccccttggaagcgatgcccaggaacatgttgtaagaggaggcgctggaattgcggggaggtattgtttccaccatggctccgtccttgtccgtgatcccctttacctggcgtttttggagcgttttatcctgccggtagcggaggaaccgcaggctgcctccttccacgggcatgcctgttccggcgtccgccaggaaccagagattgccttccggaacggaacggcgtaccagcaccatgtccgacagagtgagaaagcgatggaaccggtagccgttttccagggtgacggtaagcagataccagccgggcttgcgggtgggaacgggaatatgggcgatgtggttcaggtgccggtccccgggagtcagggctatttcctcccccttgatttcctccccaagatagcgggcacaggatgagtcatgcagcaaattggagagcaggtttcccagattggaatacccgtttctgtaagctttttccagcgttttggaggtctggatcttgtccatgcgctcctcctgccaccgcttcatatctacggggcggaccgctacgcaagcccgggaggcgttgcggtaggagaaggagacggtcaccggttctcctgccagcagtgtccttttatccgtatcaaatgtcccgttgggttccgtgatggaggcgatgcgtttcttcaggttgcccgccacgttcagaaattccttcctgtctttcttgtcccaggactgcgcgttccagttctgaagggcttttcttaataactgcgcggcggcgggcctctggttgcgggccaggaactcgtccgctgccagatgggcggcgttgacgtaatcatccggctccggagttatccggacggcggaagcaatccggatgaaatcataatccgggggaagggtggcgagcaggaatttaccgttgcccgtccggtcggttttaacgacggtctggttcgtttttaattccgccgggttgacgcccgccaccatgcccgcattgccgggaccgtacacgaattcctgatccggtgccgtattggcataagagaacaaccggcggcaccaggatgcggtgaaataattgacctggttggccagttccggattcgcctgaatggcggcgtccagcagccagcgcatgcgttctccgtcgtttttagccgtttcccaagaggaagaggcatgataaaagacgacttccggtttccccgttttggcattgacctcgacgggcacggtggcgacgttccggaacggggaggcttcctccctggcgacgtaccccggcagttcctccaggctggtgaggtttcccagggcggcgtaagcctggaagggggaaggggaactgtagcggctgcctttcaccagcaacgcctgcgccgtgatgaagcgcagttgccccagaagtttcatgttgttgtccttttccgccagccgcatggccttgacaaggcaccgcagggtttccactcggtcccttgcttctccggaatattccccatcccatggtccggcgccgcggatataggcgccgtccaccagtttgaacgtatggcaggcgttctggtacaggagcgcggcgtccatcaggaaatgggggttgcttccgtgacgcttcatctgttcctgcaaaatggaattcagattgatggaatcatccagggcattgagacgggtaagagcctggcagtaaagaagcagatctgtcccgctgtattggtcgtcatattcatggagttgtttcagggcctgttccgccgcttttttgaacagccttttacccagaagcttttcaatgttttcaacagcttgcttcctttgctgcggggaaacaggggaacttttaacttccgcaggggcatgttgttgcggaggggtggaggcgtccgccggagacggcattcctgaggccagcaatcctgccgccagaaaaagagcggaaaagaatctgttcattccgccagactacttccaagtaaaatcgttggcaagttgcaagtaggttacgggaaaagggagagtgtcttaatgctgttaacaagaccgggaatgctggaaggccgggaacttcatgaatggatgttttacccctttcgtcatgcgtgctgaatgttgctgcaacccagtttgtagatggcctcgatgtcccggacatccagcttttccaggcttccgacggagccgcgcacactgatggcctgttccgccatcagggggaaatccccgggaaggatgtccagctcctccatagtcgtcggaagccctaattcccggtaaaaacgttccagacgggaaataccttcccggatgatggcctccggttcccggaaagaaccttccacacccatcacattcacggcgaattgcacgaatatttcctgatgtttgggggaaacatacttcatccacgccggggtgacgacggccaggcctgcgccgtggtccacatggtacagtgcgctcaattcgtgttccatggcgtggcagccccagtcctgttcgcggcctacgcccaacaggttgttgtgggcgatgttgccggaaaacgcaatctccgcccaggcgttgtaatcattcagatccccgttcaggatgcgggcgtttttcatgatggtgcgcagggtggcttcacaaaggctgtcggaaaggtccgtatgttttgttgtgattaatggaaaggtttcggccaaggccaaatcaccaagcaaacgcaggtaaatattcacattcctatccttatctactttgattttctgaataatgcgtttaacggatcacattcttctttgctttcagaattataacaaaatacttctgcaaaacctcaatcgatccttcttcatctgctgtcacagcattggcacagttgtttgcagcacacgctcgttatgcctggaatacacccagtggacataagtgtttttatatgtgcggacagtccggcggaacggtcaaccgaactccttgcatttgataggatcagagaacaaaagatgggagaagatatattcttctcctgttctgtatcaaagcaaatatgataaaagattgttttcgaaaaagtccaacatatcacctacgtcatctgtatcccgccacatgtaatagttttttgtgtagttttggaaccaaaaggctatttcgcggtttcgcctgggatctctagtaatatcgcctacaattacaagccaaaaaggaagtatctcatcagataaaccaccagtttcacgtataactttcatgagaccgggtgtaaaatatttacaacttctttcatgtgcattacccctaccagcttgcatattagttgtttcaacccatccatcttggcgcttgatttcaccaaataagactttgccatttgtgatatttctaatagcaaaatccatactaatgccccacttatacttgggtttaccatttgcctttttggcagtaacattaatattgtaaattttattacagagctcttctggcaaatcatatgttgaataaatatccccaaattcttttggatgcctatctacaacaaattgccctggatatacagaatctaatgctgtttgcagtgatttttgaaatagtttttctgttccgagtgctttagcgccgctaatggtctgccagtttgccctttttcttaattcttgtgttgccatatgcaaatcttcgttatttacatgcctttaaagagttcctcgattgtgatattaaatccatttgcaattttagctatattttcaagtgatatattcctctttccgttttctactgatgttaaatatgttctatccatatcgattaaaagtgcaaatttttcttgacttaggtttgattttaatcttaatttgcgaattcgatctccaaatttcttttttatcataagccagtctctaaaaataatacaacaggtgtgtataagtcaacggtttatgagtcacattctgattgactacggtttgtttttgatgtagaatggtattaaaagaggtaaggaacagaaaaagtgtttatatgaccaataatataaaaccctcaataagcggttattctaaatataatccagaagctaaatgtcgccggaaaattaatccgctcgaagagttatatccaacgttaccatgtaaaaaatatgatgtaatttatgcagacccgccatgggattatggtgggaaaatgcagtatgataaatctaatataaaatcaataaatataggatttgaaaaaaatatatttattagtgcggctgattttaaatatcctacacttaaattgaaagaattaaagaaactagaagttcaagcaatttctgctgatgattgtattttatttatgtggacaacaggtccacagtttgctaactcaatagagttaggacaggcatggggatttgattataaaacagttgcctttgtttgggataaacaaatacacaatcccgggcggtatacattgtctcaaaccgaatttgttcttgcatttaaaaaagggcgatttccaactccacgtggagccagaaatatacgtcaattagtatctgtacatcgaggagaacatagcgaaaagcctgaaattgttattgatggtataacaaaaatgttcccaacgcagaaaaaaatagaattatttgccagacaaaattatgcaggttgggacaactggggacttgaaattccggagcagaagatagaaattttgtccaaaagtggtttaaattagggaaattcggcagatatgaaaattcagcaattagatttttagttataaaaaatcttgtccttttaggatatattttatgacttttttcacaagttggaaagtagaatgagaaatgggagctttcatatatgccctgtctgctgatgaaaccatcctagtgcttgtagctttatccgtccagggaagagcggggaacggaaggaaaacaggaagttgtgaaaatccgggaaaatcgttctggtgaacactgttcaaaatcacgatgcatggcatactcattctgctttttgcttgagcgcggaggacttcccgtttattgtcgcgcacgggccatgtacggtccccgtagttcaatggatagaacgggtctctcctaaagactagatgcaggttcgattcctgccggggacgccacccaatattattcagagccttgcatcagcattaaaaacgcgaggattttgcctctcttgtgcgaggtatcgttatggttgattgaatggggaatggttcaaggggagagcaggtatccggattatcggcgcccggccggagagggcgaataacttggaattcatgtctgattggaaacaaaaagcaaatgcggaagaatgattgcagacagcaagaaaatgtgctaaaggctgccggagaagagcctttgggacgggacatgatgctttgaggcatgaaccgggcagcatggagcaatgctttccatgccgtacaagggatggatgaaagagcattatgcaatgacaaagacaagaaaatggaggcaattaacatcatccgttatctgtcgcccgttggagaaatgatgattggctcccatggcggcaagctttgcatttgcgactgggcgaaggaaaaacgccgcggcacgatagaccgccgcatttgtcggcatctcaacgctgaatatgaagaagggacttccgaggttattgaacaggcggtaagccagctccgtgaatatttccagggggaacgcagagactttgatatacccattgtatttaccggatcggaatttcaaaactcagtctgggaggaattgatgaacatcccttacggttccaccatttcctatgcagagctggcgcgccgcattcatcatccgagggctgtccgggctgtagcgtccgctaacgccaccaatcccatctccattttcgtgccctgtcaccgcgtcatcggcagcaatcagaaactgacaggttacggcggggggcttgatgccaaacgggaattgcttgccctggaggggcgggtaagcggcagaatgctggtcttgtgacccggtgatgtgcggggcaggcaaggacgtgtcaggatctttaccatttgaggagggtatttcctccctgggcgaatccggagagcagggtacccattgctgaggttttctgggctctcgcattggcgcggcccatgtattgctccatgttggcgcggttgtacagggattgggcgttcctcatggcttccgccgcttcgtcctgaatccgggtttgcaggcgcgtcgccagagcctgttccctgatgggaacggaaccttcccggagcagggaggattgggcggcgtccagtcgggcttctcccatttggcgcgcagcgtcctgctgcatgcgtttggcattttccatccctgtctgtttttggaggtccgcttcgttcctgagggtggcggcattggcatccgccgcctgtctggtggcttccgcgctttttttctgtgcagacgcggacgccgcgcctgctgccgctgaagtagcggccagcgttattattcccaatgatgctggatcaaatcccatgcgcgcattctgatatgaaaaacggttcaggcgcaaaacgcctgaaccgttcgacatgaatcagggtttggcgcagaaggggttactcaatcacgatgctttcaatgttcagcaccggacgttccggagtggaatggggatcaatggttccggtaatgatgacggcgtcttgttctttcagcccgttcacgcctttggcagagtgtttgatgggctgcccctgttcatccacgaactggacggtcatcgtattgtttttccgtatttccaccggtaccgtaccggcggcccagactcccttctccttcatattgaccaggagctgagccgggtccccaatggtgaaggaggcaatgttttttgaaaagacggggtcatctccgatcactgctcccttgacggtgactttgtcgcccggagccgcttttctggcatctgaaacgaccagggcgcgtggcaggccaaccatattttccgcgaatctcacggccatcttctgggtaatgttctggtcggaagtgagggcgtttaccgtttccttgggattgcagcccatcagggaaactgaagccatcgtcaaaataatcaagcgtgtggtatgcatggaagctcctttctgtcgaaaggttggattccttttctccttctgccgttcatcattccgtgtaaggaaaagaatattttttacaggaacagcccggcagccagcatggcgaggtccctgagaacgtcccacaatttttccgcattgtggatgcagtccgccagaaagcggtggaggctgacggcgttgaacaggcgcaggagcgccaggaagagaagaagattggcaaaatatacgagaatcagagagaagaaggtgccgttgtccgccaggtccggctgatccttgggaatgatccacgccgtccagaacaggtggaagcaccaccagaagcccaggccggaataaagaagggcctggcaggtgaccgtaggccagaagatgtacgttacaccccataccaatccccacagcatggcccagagaggcaggaaatagggggaaagggagataaagatgttgtttttatccgtctggatgtaacctccgtccagatccgctttgaaagcatggatggagccgcggctgcaaataaccgccagcgcgtgcgtcagttcatgccccaatacgtacaggtacagcagggaggatgtgaacagcctgctgctgcccagcaccacccacacggcagcgcccatcagggcgtaccatacgggaatggagaagaggatattgaggctgccggaggcatgggccagctggtcgcacagggacatggccgtgatcagggccagcggaagcaggataagggtggctacggcatgcctgatgaaccgggttctgcgcgggagatccatgaaggaaaattcctggcattcgtcctcccagtattcggaggatacctgggcgcggtaagttttgtcccaggcgtcccggttgcattgccgcatcatgtcgccgaggcttgccgcggatcttggtttccgggcggtttctgcataccggcgccagtcctggcgcggcggtgtgtgtctgggggccttgggcatgcggtgtgaggtctggaaccagcataaagggacttgaggagaaatgcgaaccaaatttgcctcttccggaaaccggaggaaaaaatgttttatccacgccggctgttcctgtataatccgccgcatgcaagatgtcctgctggttctggaaacttcctgtgtgcagtcttccgttgcggcttggagcggggaaagtctgctgtgccaggcggcatggagagcggagcgcaaccattcctccgctattttcaaggcggtgcggcaggttctggatgctttggaagggcggcgtttgaaggaaatcgtggtaggttccggtccgggcgcttacagcggaatccgcgtagcgctggccgtggcggacggactttccctggtgcacggttcccgcgtggcggctttttcctcctggaacggacttggtctgcatcatggtgaggcctgcgtaatgtcagatgcccggcgtggcggctggacgtgggggaggctggaaaacggcgttctgacggatgtgccggcagtgcttcctgcggagcaggcccgcgtcagcgtggcggagtgcatgggaaaaggcgtgcccgttttttccacggaaacggcggatcatctggccgcccgggaaatgtcggggattgtccccgtgtatccttctgcagaggcgctcggggccgtgtggctgtccctggcggaggcccgcagagaagaacttctggaaagtccggcggaaccgctgtatgtgagggctccgcacatcacccgcgccaaacgtcccgcatgggccgtgaaggcgtaattaaggtttgactttttggaagattgttagacttttaaccggtaatattcaccaccagtagcattttttaacatgagcaatgacactttttctgagcgcctcgcatatcccaaaggtttaaaaggaatcatcgccaatgaatccgctttgagtgacgtgcgcggcgaggaagggcgtctgttgtatctgggctacgatatcgatgatctggtggagatgtgctgttttgaagaagtggtttatctgcttctcaacaagcgtcttcccaaccgtgaggaattggagggcatcaagaaacgcctccgttccgaccgcgacctgccccagcccattctggatttcttcaaaacggccaccaagtccgcccggcccatgtccgccctccggacggctgtttccatgctcggcatgtatgacgaccggacgaaggatgccgggcagttgaaggaaataggcctcagcctcatagccaaggttcccgtgatggtggcgtattactaccgtttgtgccagggtctggagcttccccccgttcgggaggacctgagcgaggcggaacatttcctgtggttgctgaagggtgaggaaccggatcagtatgaagcccatattctggaggtagcctacattctgcacgcagaccacggcatgaatgcctccacctttgcggcgcgcgtctgcatcgccacgctttcggacatgtattccgccatcaccgcggccatcggcacgctgaaggggccgcttcatgggggcgccaatgagggcgtgattgaaatgctcaaggaaataggcacggaggaccgggtggactcctacattgaggacaagctggcgcggaaggaaaaaatcatgggcatgggccaccgcgtgtaccgcgtgctggatccccgcgcccctcatttgcgacgcatggccatccgcctttcctcccgaattggggaacccaagtggatccgcatgtcggaacgcatcgcgaaacttgtccgggagcgcaagggcttgaacgccaatgtggatttttattccgccacggtttattacagcatcgggatccccaccaggctgtttaccgccattttctccattgcccgctgtagcggctgggtggcccaggttctggaacaaatggaggataacacgctgtacaggccgctgactctttacacaggacccaaggaccgcattccggttcctacgatcgacatgcggtgacaggttttaatcaggaaaggtgccggaagcaatatccggcgcctttcctgcatctgccttccgcttttctttttcgtgaaaatatcctttctatccgccggcggtattcgaccgtactgttcattgtcctgggctttttccattatagccgtagcggaagctcaagaaattattgaatagcaatatgccgttatcgcgggtggggatgaagcagatgattttttcagttccctgggagactatacgggattcccataagggtatgttctgggatatctgcggagccgtctcttccttgattctctcttatctggtatgtccctgacggaggaaagatgcggaacccgcctcttcatggccctgtgttctttggtggtggaacccgcagaacatccatgccgatgtggagaggcaggcggggggctcgtcaaatgccggtctggcgcagtccttcataaaggacgacagctacggctgtggatagattcaggctgcgggctccttctccgggcatcggaatagtcagggcggtatctgcgtgttctctcagcatgctttccggcaatccgcgggattccggtccaaaaaccagatagtcccctgcgtggaaaaccgcatcccaatgggaacgtggcgccttggtgctcaggtaccagaactgcgcgccgggggctgccgcctgcttcaattcctccaggctgtcccagacatgcaggtccaccttggcccaatagtccagacccgtacggcgcacatgcttttcatccagactgaaccccaaaggtttgatcaaatggagcctggagcccgttgccagcgccaaccgtccggcagctcctgtattatgcggaatttccggatggaacatgacgatgtggaaacggggctgcatgcgcttattctcatcacaaacaggcctcccgttcaagtgggacttgtccaaaagtggcaaataatgtacgttttcacccgatgagagacatcgtatattttgatttggaaacccgtcattccgcggcggaggtgggcggctggcataatacggccgagatgcgcctttccgtgggcgtgacttattccacggcttccggcaaatatacgatttattctgaggaaatggtggatgatctcatccggcagctttcccaggccgacctggtggtgggttacaaccacgagcatttcgactatggcgtgctccagcgttatacgatgtggaacatgattgatatcacgaacaaccttgatttgtgcaaggacatcgaacagcgcgggggagtgcgcgtcaagctggattccgtggcggccgcctccatcggttcttcaaaaacggccgtgggcacccaggctctcaaatggtgggcggaatacgcgcagacgggtaatacggagcttttaatggatatagcccgttattgctgttttgacgtgaaggtgacgcgggatgtgcactggtacggggcggaacacggtttcatccgttatgatgataaaaagggcggccaggtggaattgcccgtggattggaaattgtaacttttcctgcatgcatgcccggccagctgtagccggttttttcccgggcgctgaagtgggtctggtttcccgcctttggcggcgttgccgtttatccccggacagatgccggttatcagggaatggctggggcggagaaaggcttccgggaggaagcggacggcaaccatgctgttgccgcctggcttaacggcggttgatgcgggccacttcccgctgggcttcgcgcatttccacgcgggctttcaaatcgtagcgctggtcgcggtgggttttgcccttgcccaggcctagagccagtttcaccttgccgtttttccaatacagcttgagagctaccagggagcagcctttctgggaggtctgctgttccagtttgaaaatttcccgtttatggagaagaaggcggcggggccggcgcgcctggtgctggaagaattctcccgctgtctcccagggctggatgtcgcagccgtacaggagcatctggccgttttccaccctggcgaaggaatcggcaatattcaccttgccggcgcggatggatttgacttccgttcccttgagttccatgccgcattcgtaggtgtccagaatttcgtaatcccggcgggcttttttgttggtggaaatgtcggagctcatggcacgaaggggagaaggatgaaaaggccccgggctgggagaccggggcctggctggatagagaggattccgtacggaattccggtccggaacggcaataaagggaatgtgttgttactggttgtcttcctggaggctgccggattccgtatgatagacgagcttgccttcaatgatttccgtcagggcaatgttcgcgttgcccatatggggtgtggtaggcaccagcggggcgcggccattattaagctgggctacgcggcgggaaaccacgttgatcagcatttggggctcgggaatgattttggaggcttgttcgacgagttcggctttcatgtaaaaaggtctaggtagatatcctgatgcggagagagatataaaaacggttcctgtccggaatcaagcttatattacggcatgagctgccttcgctcgcgggaatccagttctttccatgcgccgggtttcagtcccgccagggagaaatttccgattctggcgcgaagaagccggagtgtgggaaaaccgatggcggcggtcatgcgccgcacctggcggtttttcccttccaccagcgtcaattccagccatgaggtgggaatggaggcgcggtagcggacgggagggatgcggggcggcacgtcaggctccctgcgcatgaggcgtgcccggcaaggcagcgtgcagtgcccgcggatgcggaggcccccgagttccagagggcgaaggtccgtttcggaaggagtgccttccacctggctccaataagttctgggatgcctgccggaggggttcaggagacggtccgtcaggcccttctcatcggataaaagaagcagcccttccgaatccgcatccagccttcctacaggatacacgccgggaggaaacccgaattcagccagtgtccggtggtggggagcctccttcgtaaattgggagagaataccgtaaggtttattgaacgccagaatcatgccgtgcacggcaagggtagcatgaaccgctggctttggcacgggaaattgaagcggcttgacttgtctgtgttggggaaggaaagtatctgcatgcatggaaaaacggcaggttgtgtcctgatgcttgcgtgttgcgtgcccgtctgggttcaggcggcgccggatacgggggaagtgaaggcaaaaattgcgtggaaaatctggcaaaacgaatgtgccgggacaataagggggctggtttcctggaatcggggagaggcgtttccatccctgggaatcggacatttcatctggtttcctgccggagtcacggaaaggtttgaggaaagtttccctgctttcattcagttctgccgcaggaagggaatccgggttccggaatggttttccggagcggctccgtggcggaccagaaaggaatttgaaacggcggacgttcgcggcggtcttcctgaacggatgcgccggtggttgtccagcccggcggccctgcaaatgcaggcggatttcattattgccaggtctgtggccgctctggagcgtatcaagggccagtcccgccgtccggaagagatggcggcccgctattacgccgtggcgtcggttcccaacggcatgtatgccctgattgactacgtgaatttcaagggagaaggaaccaatccggcggaacagtaccgggggattggctgggggctcaggcaggtgctggaggaaatgcgccccgtttctcccggacagcctgcggcggttgaatttgcggaagcggccaaaagggtgcttcagcgccgcgtggacaacagcccgccgggccgcggagaagcgcgctggcttgccggatggcggaaccggtgcgattcctataagaggaatttgtgacgaattcctttcccaacagaaaagaccagttgtgcaattatccttgacctgacggggattagggtgtaattccctcactccatcctgaaacttcgctgattttatgccaaacactcaagaagaaacaacgctgattttgctgaagcccgactgtgtgcggaaaaacctttccggcaccattttgaaacgttttttgtccgaagggtttcgcctgcgcggcataaagatgatccagcttgacgaaccggtgctccgggaacattacgcccatattctggatctggtcatcaatggggaaccgcttttcccgaagctgcttgatttcatgaccagttctccggtcatcgccattgccctgaaagggcccggcgttattgtgcgcgtgcgcgaactgctggggcccaccaattcccagaaggcgcagaagggcactatccgcggcgatttcggaacagacagcatgatgaacatctgccatgcgtccgacagccgtgaatccgccgccgtggagctggcaagatttttccgggaagaagaattgtttgacggccttaattaagggaaggccgcctttttcccatcaggttcattgagggccgcagctgtaataacggctgcggcccttgccgtatcggcgctgtgccttccttgggaggatgaagggggaaggcagcggcttttctgggagaagcaggaaagaacgggttacttttcccagggagtggtaagataaaggaaggcctttttcatacggtaggcctcacgcatgaagccgtccatgatattgttgtagctgtgcttggaaaaggaaaggccgtaaatacgcttgatggcggcatcctctccgtgctgcttctggcgctttagctcagcgtccatgtcccggcgttcgatattgggggcgctcagattgtcgccatgccagcgaaaatccgccagcagcctgttgtaatgcacgaacttcttccccgcccggcccaggcgcgcgtaatattccccgtccatgtcgtagtggaaacgttcgtccagcaggaacccctcttcaatagtagtgctccggcgcaggaacaatgcggtggaagccagataggtgccgtaccagatgtgcatgttcagactgtagggcagggccttcatggcacgttggatatctccgtccggcccgatgaaattccatgctccatacacaatgtccgcatccgggcgggaatccgcaaaggccttgaccgccgccagagcccccggcagcaaccggtcgtccgtattcagccacataacccatttcccgcgcgccttgcggaagccgcggttaatgccttccgacatgccggaatccttctctatatataatttcaggtgagggtaggagtgcaggatatccagggtgccgtccgtggatcctgcgtcctggataatgtgttcaaatgtaaccccttcctggtttttgacgctctctatgcattcccttacgtagcgggcgtaattatagctgggcgtaataatgctgaaatccggttctgtgtccataggcaaggttagttgaaaggcttgatggaacgttccctggcgatgtaaatagggcgttttttaacttccgtataggttttggccagatattggcccaaaatgcccaggcacagcagcacgatgccccccatcatgcagaagacgcataccagggaagtccatccgtaagcggaatggggccagatcaattcgcggaccgtcaagataatgatggaaaggaatgagataaaggaaagaagtacccccatgatggaggccagcgccaggggggcggtggaaaaggccacgataccttcaatggagtacaggaacagcttgaagaaagaccacttggtttctcctgccacccgttccacattttcatattcaaaccatttggtccggaaccccacccattcgtacagccctttggaaaatcggttgtactccttcagggaaagcagggcttccagtacgggccgagtcatcagcttgtagtcccgggctccgtccacgatgcgggtgtccgatatctgatgaatcgtcttataaaaggcgcgggcgaaaaaggaccgcagcagcggttccccctgccgggtgacgcggcgtgtccccgcacagtcatatccttccttctcaatggctttcagcatatccggaagcagggaaggaggatcctgaaggtccacatccatgacggcggcataatcccctgtggccgcttccaggcccgcatagatggcggcttccttcccgaaattgcgggagaaggaaatgaattttacttcaggggagtgttccgccattttcttaatcatttccagggagcggtccgtggaaccgtcgtccacgaagataagttccggggcgtagccctccaggcattccttgaaaacccggtctatttcttgcttgaacgccggaatggcttcttcttcattcaggcagggaacgatcagggaaatacgtttcatgtcagtgcccgaatcatacttcagaagccgtgcggatgccagaaaatatgcacaaagccttcctccgccggaaggggaggaaggctgccggaaaagaagccgtgcgcggaaaaataccggtaaggtcagaacttcggcaggttgccgatgtcatcttcgttttcaggggcgtgcgggtctttcaaatcactgtccccgtcttttccgaaagaccagaaatcataatccggattcaggccgttgcccattttcaggtttctggccctgtcggttctggtggggatggactgctcgctgcccaggcggtagcggtagggggaaccccatggatccgcaagaatataaagggtaaccggcctgccgtccttgcttttcacatggacttcccggacagtcgggttgcttttgggctgcgtagaggggttcaactcatcattgtaaatggttgtatccctggaaggaacaccctcattcttatggtcgccgaacagagccatgtaaaccacgttggaactgtattcctccccgttggccacggctacgccgtgattgttgaagggagcttccgtgccgtaggggtagcggtcatggtcgctgtggtagctctccagccccatttcaattttgcggacaatggattccgtagcctgttcgttctttctggtttcaagccaggtgtaaatggagatggtcagcgtggccagcaccacgatgatcaccatcactaccaggatttccatgagggtgaacccctttgcctcccggagccggcggtatgcggaatgatttttcatctgattctgcttgaggggttaccccatcttttcaataacctgcaggaggggaaggaacatggcgaacacgatgccgcccacgaccacggccaggaatacgatcatgatgggttccagcatggaggtcatagctcccacggcattgtccacttcatcatcatacacgtccgcgattttcaggagcatgtccggcagctggccggtttcttcccccacgtccaccatggagattaccatgggcgggaaaagcttggaggaggacatgggcgtaactacggattcgccttccttgacggagtcatggatgaggccgatggcgtctcccacgatcatgttgccggcggtatccttcgtgatggtaagcgcctggaggatggggacgccggaagtcaccagcgtaccgaaggttcgggcgaagcgggcgatggcgcttttgctctgcacattgccgatgaccggcatggtcagcagagcggagtcaatcttgcggcgtccgttgggcgtcttgctcatggccgtgaaaacagcgtacaggatggcgaccaccgcggccagaatgacggcattgggaacaaagaagggagcggccatgaaccagtcgctgatgccgaacacaaactcggaaataccgggaagttcctggttctgttctgcgaacatcgccttgaatttgggcacgatgaccagcatcaggaagatcacgatgcctacggcgataaacaggacgatggagggatacaccatggcggagatcaccttgcttttcagcttttgggccttttcctggtattccgccagacggttcagcacgacttccagcacaccgcccagttccccggcctttaccatgttgacaaacaggcggtcaaaaattctggggtgttgggccagggcttccgagaaggtggagccgccctgaacggaatctccaagagcctcaatggttacgcgcaggttggggtttgcctcctgtttggccagcacgttcaaactctggagcaggggaagccccgcgtcaatcagcgtagcaagctggcgggtgaaaatcatcagagccttggccttgattttgcctcccagcttgcctttttgcttcttggctcccttggcctttttcttggcggcaggcgtctgctgaatcttgcccttgcccgcttctacgatttgggtggggtacaggccatgcgcccggatggattccatggcctccgcttcggaattggcctccagggtacctgttttctggtcgcctttatggtcaagtgctgtgtattgatatttaggcatatatgttgtattttaagtgttttttcttagtgattgaaataaggggaagcaacggcgtccggctgtccgttaagtatatttcagcacttcttcaatggtggtgttgccgtcataaatatttctcagcccgtcttcccgcagcgtggacatgcccatttcaatggctttctgcttcagcaccacggaaggagcgcggtccgtaatcatgtcgcgcagggtatcgttaatatccaggagctcataaatccccttgcggcccctgtagccggaattggagcatttatcacagcctcggcccgtgaaaaagtgcttgtctcccagttcatagggagagacgccaagctgggagaggatggtggatgagggttcatacggcgtgcggcagtccggacagatggtgcgcaccaggcgctgtgcaagcaccccttccagggaagccgccaccaggaaaggttcgcatcccatgtccaccagtcgcgtaatggctccggcggagtcgttcgtgtgcagggtggagagaaccaggtgacccgtcagggatgcctggatggcgatctgcgctgttgccatgtctcgcatttcccccaccagaatacggtccgggtcctgtcgcaggaaggcgcggagcaccattgggaagtccaggccgatggcttcattgataggaatctggatgatgccgtcaatatcgtattcaacagggtcttccgccgtcagcaccttggaatcaatggtattgatttcacgcagggcggcatacagcgtagttgtcttgccggcgccggtggggccggtaacgatgaaaatgccgttgggcttgtggaccgtatccagaatatattcgtggatatgcgcgggaagccccaggttgtccatgttcaagttgacggaagagcggtccagaacgcggagcaccacggattctccgtactgagtgggaagggaggaaacgcgcatgtccacggaacggtttcctatctgcttgacgatgcgtccgtcctgcggaatgcggcgttccgcgatgttcatgttcgccatgactttgacgcgggaaatgaccggcacggacaggtggacggggggaggctgcatttcatacagggcgccgtccacacggtagcggattttgaattccttctcaaaaggttcgaagtgaatgtcggaggccttttccttgatggcctgcgtaatgacgaggtccacaaagcggatgacgggagcggcggcggagtcctccgtctcattgttgacctgcatgttgttcagctcctgcatcaggtcggacatggcggcggattcgcctccataaagctcattgatgcgttcggaaatctggtaatccggcgctaccagaacatggatgtcctggccgagggcgaagcgcaggtcttccaccgtctggggattcaggggatccaccaggcagacgtacaggccttccggaccatgccgcacagggagcgccccgtgcaggcgcacgagcgtggccggcatcatgttctgcacgttcgggtccggctggaagttgtccagtgtaatgaattccgtacccaggtcgctggcaatcatctgccagatatcatccttgctgccgatgatgccgaagtctgcaagcacttccggcagttccttgccggaggcgatcatttcctccttgatgtcctttgccagggatttgtcaatcattccccggccgatgaaaagttccagtgtgaggttggtgtccataataagcagaatgaatagcggggaaaaatcagttggcgtctcccatggtgacgttcagcacttcttccggagaagtaaggccggccagcactttgcgtacgccgtcttccctcaaggttctcatgcccagttcccgggcgcgctggcgcagctggggggaagtcaggttttcgttgatcatgcggcgcacctcgtcgtcgatttcgaaaatctcaaacagccccatccggcccttgaatccgccgccgcggcaaaagtcgcagccgtggggcgccttgatttggccctgggcaaggcgggacatgtcaatgttcagcgtatgcgcctgcttttccgtcagagtgccgtccaccttgcagcggtcgcacagcttgcggacaagacgctgggccatgatggcgcggacggaggaggcgatcaggaagcgtttgatgccgatgtccgccagacgggccacggcgctgggagcgtcattggtgtgaagggtggagaatacgaggtgccccgtcagggaggcgttgatggcgatgctggctgtttccatgtctcgaatttccccgatcatgatgatgttgggagcctggcggagcatggcgcgcagggcggcggcgaaggtcatgccgatatccgcctttaccattacctggttgatgccggagagttcgtattccacagggtcttccaccgtgatgatttttttatccgggcggttgatgtggttcaggcacgcgtaaagggtcgtggttttaccggaaccggtaggacccgtcaccaggataatgccgtccggcagcgtgatgaggcggtcgaacacagcttcatcatccgagaaaaatccgagctggggaaggcccagcaccagggcggatttgtccaggatacgcatgacgatgctttccccgtggttgctggggacggatgaaacacggaggtcgatttgcttgccgccgatgctcatctggattcgcccgtcctggggcatgcgtttttccgcaatgctcatggtggtactcattaccttgaggcgagcaatgatggggctgagcagttttttgggatgcgtggccacttccaccagcttgccgtccacgcggtagcggatgcggagcctgttttccatgggctcaatgtggatgtcggaagccctcattttgaaagcgtccgtcagcatctgctgcaccagccggataatgggagcatcctccccttccagcccgtcggtttcttccggaacgctaagatcccggtaaaattcattcaaccggctttctatcgcgctgtgggtggcgacgctgaaaatcacatcccgccccatcagctggggcaggctgtccatggtttccagattcagggggtcgtcaatagcaatgttgatggaaaaaccgtcgtcggaaatggggatggcccggaagcgcctggcaagttccggcgtaatgagttcgcgcacctcctgggggatgtgcatggagcccaggtccacgacggggagcagggagtttgacgccgccacctgagcgatgacgtcttccgtaagataattggcctgaatcagaaaatcgaccaggtcctgggtgggagatttttgactgcgcgcgtactgaagaatttcttcattcagatatccggcctgcgtaagaagttcgatgagatatgattcgttggagtacacgtcgatctctggatgctattgttagaagtctgccgaaatggagcggcaggatactcccctatttctgacaggttcggaacgtaaagtcaacttagcttccctcaaaatggcattttttttcgggcgtgtccggaggcgggaagaacctccttccctctccgccgcttttcaaaccctgcggaatcttccggaaagcgggattttccctgtactcagggcttctggcgggggagcttggaaagcaggtcttccagctccggcatgctggatacccgcaccaggcgggaacgcatttccttggcgccgggaaatcccttcgtataagccaggattcgtgacctcatatggcgcatggtgtgaagttcgtccccataatggcgggattccagggccatccgggcatgccgcaaaatcagggccgccttttcctgcgggtctctggccggtggcatggttccgtgcagcagataatacttggcgtctccgaaaatccatgggttttccatggccgcacggccaatcatgacgccgctgacggccgtattttcttttacataagctacggcctgcggggtggaaatatccccgttcccgatgaccggcacggacatggcccgcgcgcattcgtcaataatgtcccagttggccgttccggaatactgctgggagcgggtgcgcccgtgaatggtgatcatggaaattccctcattctccagcaggcggcacgcgtccatggcgcacaggctctgaaaatcccagccaatacgtattttggccgtgacggggattctctctcctacggctttcacgacgcctccggcaacggaagccagcaggggaagatctttcaggagggaggaacctccatttttgccaaccaccttgggaaccgggcagccgaagttgatatcgataaaatccggcttctcatggtccaggataattctggccgcctctcccatgtggttcccatccgctccgaagagctggatgcctatggggcggtgggcattttctatctttgtgtacctgcggtttctctcccatgcctggagaattccttccgcagagacgaattccgttaccattacatccactccaagctccttgcagatagtgcggaaaatggggtccgtcactccagccattggagccaggaacagcgggaaatccgttttgaagaacgagaggggagcgggacggttggaaaaagtcatgattccttaggatgaggctagcacgggttcccgtcccattcaagcatcttgcctgttctggcgaagaagggaaggtgcaagatgccggtgctgtgcaaacatcggagtgtcgaaaatatggcgctcaataaagaggtgcagtagtccgcccggttttccggaggaaattgcaggcgcgctggacagtatcgtttgttttcgggaagaaaaaacggcttcactttttgagtgaagccgtttggcaaaagttgaaagattgtcttaatggttgccgcagccgcaaccgccgtccttatggtcgtggtcgcacttgccgtcgcaatcgcaattttccttgtcgcactggccgccgcaggagcaggaggactgggcgctcatggcgcgctggcgggcttcctctatttcttcaggagtgggagcgcggccaaggtcaatggacatgcccagataatgattgatggtgttcaggagttcgtcaatggtctggcgcgcttccaaaaagccgcgggccgcatcattcttgatgacgttttcacgcagggcgtcgaatttggaaatttcctcttcggtaggaggcattccggccaggtgcttgttgcgcagttcttctccgtaagcgtttacttcttcaaaaagcttggttgcttccggattttggaaaaagagacctatttttgccttggaggccacaaccttgtcttccttggcgagcagattgcaaagggcttccgtggcggcgcgcaggttgtcgttgagaacgggggtattcatatgagatttatttaatcatgccttttcgtgcagggcaatccggttgcgaggcatggcgcgcatttccttgccgcaggtttgctgcaggcgggaaatccggaagaataaaaaggcgttccgcttgacgtggaacgcctttttatggtgatcaacgttttttaatgcgccttgcagaattcttcaaagcggtccagagcttctttcagaatgtccagcgtggtgcagtagctgatgcggatggccttgtcattgccgaaggcgatgccggggacggccgcgaccttgtagcgttccagaagcttgtcgcacagattcagggaggtgagtcccagcctgcttgtgtccacaaagaagtagaaagcgccctgcggctccacaacactgatattcgggatggcgctgaggcgggagtaaacgtactggcggcgcatgtcatattcgtcgcgcatgtcgctgatgaagctctggtctcccgtaagggcctcaatgcctccatactgggcgaacgtgcagacgttggaagtggtgtgatcctgaatcatctggatggccttggcaatggctgccggagctgcggaatagcccaggcgccatccggtcatggcgtagcccttggagaagccgttgatggtgatggtcaggtcgtacagttccggactgagggaggcgatgctgacgtgcctggcgtccccgtatacgaggtgttcgtaaatttcatcagccaggatgaggatgtcttcgctcagggccacttctcccagggcgcgcagttcttcttcggaataaacggacccggtcggattgtttggggtagtgaggatgaccatcttggtgcggggggtcatggcttcctcaaattgttcggcggtaagcttccatccgttttccgccgtggtttccacgatgacggggatgcctccgcacatgcggaccatttccggatagctgacccagtacggggcggggatgatgacttcatccccctcggatacggtcgccatgatggcgttgaaacaggcgtgcttggcgccggctcccacggtgatctgggtgaaatcgtattccaggttgttttccctcttgagcttttctgcgatggcctggcggagtgcgggaagaccggcggaaggcgtatatttggtggctccgttgttcagggccgcgatggctgcctgcttgatgttttccggggtgtccatttcaggttcaccgcctgccaaaccgtaaacttcttcaccggaggctttcatagccttggcccggttggtcaccttgagggtcagggaaggggtcaatgccgcaatgctgggggaaatcatgtccattgttgtggtgcagtcgtagattttgatgccttggcggaaaacaggctgttctccgcataggcggaaaaactttactcattgagcgcacccctggcaaggagaatgcttgcggcggccattctttttcttgcggagggcgttcctccctctatggaagggatttttcccgtcagcgtttcaggaatttggcgcgcaccgcttccagctccggcgtcttcagcaggaaagccgccgccaggtaaacgatgccggcgcaaccgcagaccagggatatccccagcaccctggccgggaaggtccagttcaggaagccctggaggaaccatgccttgcctgcccagcacacggcccccagcaatattcccgccgccatgatcctggccagtccggaaagcagcgtccgtccgtctacgccgcccagctggcgtcgcaggtaaaagaaataaaagagaaaattgaaggtagtgaccacggaggtggtcagcgccagccacgccgcgtttttatgcaggatgtagacgaaacagtagttgaggccgatgctgatagccagagccacggcggcggcaatcaggggaacccagcgtttttcaagagccaagaagacgggctgcaccaccttggtcccggcatagcccagcaggcccagggaataggctcccagcacttcccctgtgtaacgcacggcctcctggttgaagcggccccactggtatacggaggagacgaattccgttcccaggatggagaggatgagaaaagcgggtaccgcaaagaatgccaccagccgcaaccccttggcgatgtggacagccacctcttttctgccgtctcccaccatcatgcgggaaacagcgggcagcaccaccatgcccgtcgcaactccgaagagccccacgggaagctgccagaggcggaacgccgtggtcagggcggtgacggagcctttttggagatccagagcgaaccccgtattgatgaagatggtgaactgcgtcacgcctgaagccagcacggagggaagcatcagcccccagattttgcgcacgcggggatcgttccattggaaattgggtttccagcggaagccgattttgctgagtttggggagctgcacggcaatctgggccatgcccccgatggtgacgccgcaggcaaaaccgtacaaagctttggggccgaaggacggatcaatgaaatatccaatcagcaggccgagcaggatggaagtaacgttgaaagcggcggaggccagcatgggcaatccgaaaacccccaccatgttcagcgcccccatgatgagggcggacagggaggcgaatccgatgaaaggccacatgatgcggctcaggtccgtggcgaacaattgctccgccagagagtgatccccgctgtagagggcttccatgacgggccctgcaaatagaatccccagcgttacaatggcgatcatcagggcggaaagctgggtagctaccttgttggtcagttcccacgcggcttcgtctccctgcgcttcccgcgttttggaggctacgctggtataggattgggaaagagccccttccgcgaacagatcccttaacaggttggggatacggaaagccgtgtaaaaggcgtccagggctcccgtggccccgaacagggaggtgtacacaatttccctggccatgcctgtcaggcggcaggcgaagatggcgcctgaggcaaccaggctgttccgcatcagggacatgaaggggggggaatttacttgaacagctggcggcaatacggctccacccgtttcattgccgggttgtccttgacagcctggtcgcgatcatcccggcaggggaaaaggtacagggcgtatcccccgtagccgcctcccaggtatttttttgcaagggcattgggaatttccggaagggggcgcattccttcgtcaagctgcacgctgtagtacagggctacgcctgccgccagagtattgatgttgcgttccagcactccggtgcgggcaatgagggaggattgggagatgcgtacgtagtcccgttgttcatccgccatctttggggtgtcgtgttcttcgcccgtgtatagaatggccattcttccttccaggaagtcgcccgtgcctttgacgtccagtaccggagaactgccggaacgccatacgcacaaccctgtttccgcaatgacggcaggatcctgccagccgacgcccagagcgagttcggacgcgaccggatcgcgcccttccagcatggcccacgcgccgctgcctcccagcccggagcgtttttcatacggccattcgcagagggaaaccatgggggtgatggcgcagttgaccacataggagccttttctggcgtagcggggcacgtccagccatcccccggcaaagtccacgcgaagtggtacggcggacggagccttgatgcggttcaccagcatggtggtggagacgggagtgaatttggggggcgtcttggggagcaccacgtaattggctccgacgcgggcgcacagctccttcttgatatcgctgtaaaggtcatcttccgtcacagccaggatgtccggtttttcctgaagaaactcttcttcaaaatccaggccctttttcatgccggtacccaggataaccttgtcaaccatgcgcaggctttccagcagaacttttttgtgttcgtccggaatggacggcttgcgctgcttgtggtgccacagcacgggttccgaagcgaaagagacgattagatagtcgcccagagcgcgggcttcttcaaagaactggatatggccagcgtggacgatatcatagcagccggagacgaaaacttttttcatgcgtgtaatgatagataattagtctgcaacagtatgccctattgccgtgccggatgcaagagcgagatgaaaatgcgttaaaaaacggcgcggactacagaaagcccgtgccgtttggggataggaaaaatcaacttctgcaaaaacggtcaggaagccatggcctcctggtagcggcgttccacatcgtcccagttgatcaggcggcagaagtcttcaatatagtccgcccggaggttctggtgcttcagataataggcgtgttcccaaacgtcacagacgagaatggggacgagaccgggaatttccagattctgatgtttttccgccccgcagattaccagcgtcttgctgatggggtccacgcccagaatgccccagccggaaccttccacgccctgggaagccgccttgaattccttcatcatggcttccagagacccgaatttttccttgatggcatctaccagagaaccttgcggctcttttttgggatcaggcgtcatgttggtccagtaaatggtatggagaacatggccggaagcattgaaggacaagttacgcacccagttggtggtggcggaagcgtccagtttcccgtccgcaatttcacggagcttttcagccgcggcattggcgccggcgacataggccgcatgatgcttgtcgtggtggatgcgcacggttttttcatccagcatgggttcaagcgcgtcgtaggcgtacggaaggggtggcagtacatatttgccgtcggcatagccgatcgtggaggggtcttgctgtttagtcatcttgtgctgtggttgtatgaatggccctgttgcccgagcctggctgattgttcccagcgccgccaatgaggaaagagcaataaaacgccttctgttcatgtccgcgccatgggaatgcatgggtgtttggacatggattgttttggagttgttcaaaaaacaggaacctcggtgttctatttttcttcttgtagaggcagctgggaaaaagcttttctaccttctggcggctgctgccgggccctgggctccataggcgctgacgcccctgacggcgacagatcctgcatcccccaggaaggatttgggcagggttacgcgggtctggctgcccggcagaaggatgcgcgtagcccactggctgccgtagcgcgcctggacggcccatttccgggagggattgccggacggctgccaggagagggttacggtggaaccattgtccgccacataaaaattctgcggttgtccgggtgtgccggttccgcaccagggcatggcgggcggaacggccatggaggggtacaatctgttcaggtatttctggatgcctccggcattccgcatgatggatttgatgctccagaagcattgcccgggggcggttctggcaaggctgcgggagtagttgacctgcgccgctatttcagaggcggggcggcccgggtcttcgctgctcatgatacgtgccgtggcaatgccgggccacaccgggcgtctggagttctgggcggcccaccattgcatcaatgcgggaaagctctgcttggccgggctgcagcgccagtaaagctggggggctaggtaatccacccatccgcgggaaagccacttgcgggcgtcgcacgccagatgctcgtaggcgtccacacccgcttcaatgccgccgggaacgcccggcctccagatgccgaacgggctgacgcccacccgcacccagggtttggaagatttgacggatttgtacatgtcttgcacgaagtcgtcaatgtagccccggcgctgggagggggatttcccgtctccaaagctggcgggagaccaggtgcgaccgggagtgggataggggtagaaatagtcgtccaggtgcaccccgtcaatgtcgtagcggcgcacgacgtccatgataaccttcagcgcgtggtcgcgggaggcggaggcgctggggttcatcagcagcacggagccgtttcgcttcatcaaatcagggcgcgtgagggaaatatggttgcggcctacggcatgcttgacgttggccttcgcccggaatgggttgaaccaggcgtgcagttcaatgccgcggcggtgagcctcctgaatggcgaaagccagaggatcatacccaggattgacgcccgggccggaaagccattggctccacggttccagagaagagcggtacagggcgtcggcattcgggcgcacttggagaaacacggcgttcagcttcaactgggcgcaggtattcaggatgttcagcagctccgcgcgctgggctgctccggagaggccggaacgggagggccagtcaatattatgaacggtggatatccatgccgcgcggaattcctgggggacagcgggaacggattctccggaggtctgccacccaagcgcctgggaagccagggccagcagggagcaggagaaggcatggaacaggggaaatctggtcatgacgggaatggagagggatgtttccggaacatttaacgcctattcggcggatctgtccacgacggatgccggaggttccgtcatggacaggcggccctcagctgggccgggatgccaggctgttgatcaggtgggcgttgaaaccggccccgaagccgttgtctatgttgacgacggaaacaccgttggcgcaggaattcatcatggcgagcagggtggttaccccgcggaaattggctccatagcccacgctggtaggtacggctatcacaggggcctttaccaggcctgccagcacgctggggagagctccttccatgcccgccacggccaccagcgcagtagcttggcggatggagtccagatgggaaaccaggcggtgcaggccggcaacgccgcagtcccggtaccggactacccggctgcccagaaattccgctgtcagggcggcctcctccgctacgtattggtccgaggtccccgcgctgacgatgccgacgaagcccgccgttcgcggaacgggattcggagcaatgcgcatgagacgggcttccgggtgcatgtccgccgccggaaaggcgcggttcaggtagtccagagcttccccgctcagacgcgtggccagaacattttgtccggcggcaagcaggctgcgggctatctcttcaatctggtccggcgtttttcctgcgccgtaaatgacttccgggcaccctgtgcgttccaggcggctgtaatcaatgtccgtatgggaaggagcgggtacggtgccggctctgattttttccgccgcttcctccgcagaaaggaggccttttttaaactgatgcagaatggaggcgatgtcgttcatgagggttcgttcatgctccctctggaatatccttccagatccagggtgatgtgccggaagcccagttcccgcagccggcgtgctgcggtggaggcaagctgtccgtcccagaacagtctgcgttccttttccggcaattcaatgcgggccaggctgtctccgtgagcacggacacggcagcctttcagccccagggttctcaggaaagattccgctgcgtccacgcgtctcagcagaacttccgttacggggcggttgtgttccaggcgggtcagcaggcacgcataggccggtttgccgctgactgattccggaagacccagccggcaggccagccggcggatatccgccttatccatggaagcttccagaaagggactcgggatgccgagctcctgcaaagctttgcggcctggccggtaatcgtccaggtcgttaagattggaaccgtccgccagcagggggaaccccatctcagccgctctggctgccagggaggaaaacagggcatgcttgcacaggtagcagcgcaggggaggattattcgcaagggcgggaaggatgggaaacgccagtttttcctgccggacgcccaggcggcggcacaacgccgtgctgtcccgcacttcctcctccatcacgtagggcgttcgcgcagtcagtgccaggcagtgatccgctcccaggatacggacggcggcggcaagcaacacgctgctgtccagccccccggacaaggcgacggcaatgcgtttcctggggagaaggacggcgcgaagccgttcaaacggagtctgtggcgtcgttgtcatgggaaggtgtgggaaaaagccccatcagctggcattgttccagcggcagcccggttttttccgccaggattctgcaatcttcaaattccgctttccggtaatggggacggccgtgcatgaaagaagtttttacatgaaccgttccatggggagtgtggacgggggcgctttcccggcgcagaatatggcggagcatgccatgctgcctgatgcccggcgtactgctgtgccggaagaaggcttcccgcacgcggtccgtctgttccggctggcacagggcgcaaaccttgactgccagacggcctttcttcatgcagacggactcctgccaggtatccagagcgcctgcctccatcagcttttccgccaggtaggctgtctgttccggcgtcatatcgtctatattggcgcacagctccgtcagcagttccggggaagtttcctcttcttccgtttctaccagcatcactcgcagaatattcggtacgggaagtccctggcggtggccgattccatagccggttgcggtaatacggcctgccagcggagcggggacgggctgcgccagggcggcaatgtaggcggctccggtgggtgtagtggcctcatgggtggttccattcaaggtggcccggaaatgttttgccagcaaagccgttgccggcgcaggaacgggcattgttccgtgctggcaggttacggtgccagaccccagctccaccggtccggtgaagacggcgtccacccggagcatttccaggcagatggcagctcccgcgatatcgatgatggaatccaccgcgcccacctcatggaaatgtacttcttcaggagtagtgccgtgtacgcgggcctccgcctccgccagcagggtgaaaatagaaacggccgtccgctttacggtattggaaagggcgcttgtctcaataagctttcgtatatccgccatagtccggtgatggtgcgcatggctgctgtcggagtgcccttcttcctccgtcagtacgtcaatccgtgttccccggatgccgtgctgctgcgcccggcggcattccagcttccactccccgtgcacatgcaatttggacagttcccgttccaggttttcccggtccgctcccaaatcaatcagggcggccagattcatatctccgctgatgcccgcgctgcaatcatagaccaaagctctcatgatggctcagtgtagaaggaaaaactcctggctcaaggtcaaaatgagccttatcccgggagggggcccggtgcttggcggaccgggtttggcggattgccgtccggttatgagaaagatgccctgtgaaatacattgctagggaactttaaatatgccacaatccctgcggcgctgaccagcgccgcccccgttctatatcatgtccattccgttcttttcgaaattacgatcccagaagcattatcttcaactggttaagccggaattgaagcaggtttccgagtttgttgaagcgcaatcatcatgttttgacccggaagtggccgattacatggaaacggtatgccagtccaagggtaaaatgctccgtccggccctggttctgctggttgccggtgctacgggcggcatcaagcctgcccatatccgcctgggtgctttgctggaaatggtgcatctggcttcccttgtgcatgatgacgtgattgacgaggccgacaaacgccgggacgaggctacggcgaatgccctctggggcaacagcctcgccgtactgctgggggatgtcctcttttcccacgccatggtgctgggtacggaattcggcagcacggaattctgccgcaggctggcgaataccgtcaggaacgtatgccagggggaggtggcccagtccagccgcctgtatgatctgagcatgacccgcgaggaatattttgaaatcatccggaaaaaaaccgcttcccttttctccgcagctacggggggggctggctggatttccggagtaaccccggaagtggaggaatccctttaccagctgggggatctgctgggggtagcctaccagatttacgacgactgcctggacatggtgggagatgaagacgatgctggaaagacgcttcatacggacgccaccaagggcaagctgacccttcccatcttcaatttgctggaatgcggtgacaggaatgtggaagctaccctgcgggacgccattgaaaaccgtgaagtagtggattactccgcctttcaggacaatcccgtttttgcagaggctctggacaaggcgattcaggtagctctggagaaaaacgaggcggcccgcgaaattctgtggctccttccccaaacggaatatcgtgaggctttggcggaaatgaccttttacatggacgagctgcttaacgactgccgtatctcctgacctgcttcaaggagtttttgtccggtcatgccctccttatgtaatttgtgtcttccggcattttcccaaaaggaaacctgccggagggaatgggaggagcgcatgctggttacggcctgattgttttttcaaaacatggttaaacccggccacgcgcccgggaacggcagtgctttctttattccgtttttccgtacctgcgcgcccggaaggagtaggcgaccgccaccacggcggcgagcacggcgtacaggatgaagcggtgagtggaaatggcgttggctgattctccgttggacaggaaaaaagtaattgcggctaccagcatgttgcctgcaaagatagtgaggttccagaaactggtgatgaggctttttaaatgcgccggggcttgcgtataggcgaattccaggccggtggtgctgaccaggatctcagagatggtgagtacgcagtaaggaatcagctgccatgcgatggacatggaggttccttcctccagccggtattgcaggaaagcgacaatcaggaatgtagcggagctgagggccaatcccgttccgaggcgcaccaggggccttgccagcgttgccaccctgggataaacaaatacggtgatgagggggatgaacaccatgacgaaaatgggattggccgcctggatttgggccggcccgatggaccaggaaccgcccgggagcgggatggaaagaggaatcatcctgctgccctgggatacccaggaagaagccgtctgttcgaaaatggaccagaatgggatgataaaggcgaagatggagaggattttcaggatgtgccgggtgtcttccacggcagaagttccgcagcgctgttctgcgtttttccagcctccgtggaacagaatgatgaaaaggactttccagaagccaggctgcccgctgttccgggccggaggcgttttgtggtattttttgcggcccagccagaagacgaaggtggcaactcccatgaagaggcccgggacggcaaacgcccaactgtacccgtaacgctgttccatggccggaatgaccaggaaggagaagaaggagccaaggttgatagcccagtagaaggcattgaaagccttggtcattaactgcggggacttattaggaatctggtctcccataaaggcggagacgcatggcttgatgcctccggctcccagcgcgatgatgaacaggcccgccatgagaatgtaacggcgcgcttcaatggtgtggaaaagatccgccgtcgccagaactccgtgtcctacgcagtaaagcagggaaatataaagaatggttttatatcggccccagaccttgtccgccagccaggcccccgccaggggaagcagataaaccattcccacaaaaatatgaagggtggaggtggcccagttgtcgctcatcagcagatggcccgtcatgtacagcatgaggatggacttcatgccgtagaagctgaaacgttcacaggcttccgttccgatgatgtatctggactgggagggcagggcgctcattggatgatgaaaaggagggagatggagaaggagtaataaaaatgatggcctccgggcggaggccatcatggtgaatgcgttcagacggtgttcagggcctgtgagaaggagacgggctcactgacggttgtcatgaaagggaaaacgttagcgttcctggttcaggatgggagcgatttctaccttatattgggtgatgcacgctttcagccagtccagcatgatcatggattttgcctgggctgtcagagccggagcaatttgctgggtagatttgatttggaattccggcgtatcctccagttcgcgcttgacgagctgggttagcaggatgccgtcccccgtgttgatgggctgagccatctggccggggttgatgacggaagccgcctgaaatacttcttcaggggccgggagctctttgggaggggccaggcgggaattcatggcccgttccagaagagactggagctcttcctgtgttttggcgttttgcaggttgacgctgctcaagagtacgtttggattgacaaagggaccgtaagaggcagttttggcaccggcttttccggcaatggcattgaactgttccacggggttttccgccttctgcaattccgtattgagttccgtggcggccttatttatggattcaacggtcatgctttccagcaggtcggcgcgggcgctgttgcgggcggtttcgtaaggcagggctttgaccggagtaatgccttccagacggatcaggacgacttgtccgttttccagcacctgcatggtgctgatctgttcggctccggtcttggcgcgcgcttcttcaatggccttggcatccgcatccgcattcagggccggggctcccgccagggagaaagccacatccagcagattggcgctgcgtccgtcggaagcggattggttgattgcctggttgatttcctgaggcgcgtttttacgcgttacggccgtgtaggactttttctccattttgcagacgccgggagccttggccagggcttcgctgatggcctggtccatgttcctgccgttggtggcgttcagcggttcccagatgtcattttccaccagattcatggtctccatggtggcgttggaaatgtctccgggcttgggtgcctgggcatcgcctgcgggaatgaaggtgtaaacggtgaagaagcgagcttcctcatttttgtaattttccttgtgcttgtcccagaaggtttttatttcctcttctccgggatccgtcttggggcggaaggcgcttttttccaggaaggcggtgttgattgtaatttgctggctgttggattccgctacagcctcggcaaaaccgggctccacggagatacccccggccagcacgtccttgatgcgctccaggctgatggtgtcttccatcagaccgcgcagcagttcctcctgaagctttttacccatgttgccacgcatggaaatgaaattatcgtatttttgggggtcgaaaacgcctttatcgtcctggaactctggaatattgcaaatggcatcgtcaatttccgcggtgctgggagtcaagcccaggcgtcccgcctcccggcggataatgccgcggtaggccaggaaagccgcattgggattatttgttttcagcagatggcagagttcgcgcaggttttcttccgagctgaaattgtcctgaagcagcggaccgaaggtggaagggaaggagaaagccacggacaggccggtcctgcccatattgttataatccttttccccgtaagatttcccgtccacggaaacgaaagtctgcttgaacatgccggtcagggagccgccgcttacgtccccgccgacgaacatgaggcccacaaacaccagggccatggctgccatgatgacgattgtatgtttacgtaagtaatctagcatggaatgtcaggttgaaaatgtacgtgtagccggccatgagctgacggcagcccgggcagcccgaaccttttacactttttccctccgctaggcaagaacgaagctctccgcttccggcggcttttccagaacatggcggcatgctctttcctgtcatgaagggcttttccggccggggctgaacaatttttgacctcgacggtgatgcaaatacgccttatgttgctcctgcgcggaaggttccgggaaccatgggccggttctgccccatggcattcggaagcctccggtgcatgtccttagccggatattcctttaattgcaaggatttatgctgaaccaggtagtagaactcaaaagagaagtgacggcggtccagatccccagcggggatgtgctcaccctgccggaaggggaacgcgtgtatatcacccagatactgggcggctcctataccgtggctacggaccacggcctggcccgtatctccagggagaacgcggacgcccttggcgctggagcggaggaaccttctccggaagcggctgcgctggatgagaacgccacactggaagaaagggtctgggatacgctgaaatgtgtgtatgacccggaaattcccgtggacatcgtcaacttgggcctgatctacgatgtggccgtcattgagctggagaacggccttcatcatgtggcggtaaaaatgactctcacggcgcccggctgcggaatgggcccccatctggtcatggaagccaaggaccgcattgaagcgttggaaggggtggaggctgcggatgtggaaatggtgtgggatcccccctggaaccaggacatggtcagcgaggagggcagaatgaaactcggattgatttgatttcccatgccggtgacgttgaaattgtccgacgaggaagcgcgtgatttggcggaaatgctttccactgccgccacggtggctgcctccaaccagcaggacggggcggaggcgcgtctggcggcgtgggggaatttggtttcccggctgatgaaagagctttccgtcacctccaaattgaaagggcgcattgcctatgcggatgatctgggcggatatgccttcacccgggaatatgaagaaagcgcctttttccaggattgcctggatgaataccgggacaactctttttgggcggatctcgtgacgcgtatggcggacaaggccatcagcgaacacctggggccggaatattttgaaaacatgccggaggatgaacgccgccgtactgcggaagccctggaaaaatccctgtggcaggaatgcgccagatacggcattgaccggctgggcttcatcttgcctccgtcagacggataaggagaagaaccgtttaaaaatcctgtggaccggtgcggcccgaatgattcgggcgcgattcgcgtgcatatccccggagaataccggtccatgttgcctgtctgccgggaaatactcccttatatccgccctgtttcaggtatcgggacgacatgcgctctctctggatgcggcaagatgattttgggggagttgttcagtccggagtgcagcggttcaccgggtcggggccttattcctccgcattttccggcagtggcggggtggggctgcccagatattccgtttccttgggggtggagagtactttgtaatacgcccaagcggcggcggccagtacgccgccgatggaaacaatcatggttagccagccggtgggggacataatcagttaatgttctcctgaacaagattggtaacggccttgtcaggcaggaccagcttgatattctggggcaggggacgattttggaacagcttgaaatccgtcattttcgtagttccccccgtctgaagcagcacggaaccatcaggctggatattcgccatgacgttggtggagggggttgggtcgccggtgaacgttacgctggtattgggatgccatttgccgtccttgtacgcgaagctggggccaaagaaggctccgcgggccttcttggctgattcaaaattacgcatgaaatcttccacgaatccgacggagaaggaaagttccttttccgaggaatgcgttttccatttggaaataagatcccaggacctgcttttattattaaagtaataaccgctgatttccttgaatttccccatttttttgacgcagacgaggaagcgcatgttctccccgattgcccagggatagtccacgaagctttgtccgcctgttccttcaccgccaaaacgtccggagcgcgcatctttgcccagttttaccagcttggtgcgttcttcttccggcacatcattggggttgtctccgtgtgccaccggatcccagatggaaaagatgattacttttttaccgttggattgttcctgaaaaccgatatagccgtcgtcaaaattcatggcgcaaaagtaggtgccgggaacggatgttttggctttcactacattgtacagggcgcttgcctgggagggatgcccctgctggttgatatggacggaacggcactggcgcttggccagcagttccgggtcctgcgcatgaaggatggttccggagaacagggcggcgcaaatgacggcggcggaggataaaagacgcatggttttgaatgattgatggttgtctgatttgatgcccggagggtgggggacaggcaaataattaggacaggctaattacgtttggcctgggggaaatctcgcaggcaggccgcacttttttcaaaatttttccggcatgaatgtgataaaagaaatacttggctcaggctggttgctcaagattctgaaacggctgaaaccgtaagtccggaaggccgggcagccgcactctctccttccccttcccgctttcagccagccgacgcggaacatacagctttgcctgaatggggaaggccgttctgcgaaaaattcgggaaacggccttcggaagaatgggggaaaaggacgcgtttgttaccggatggggttcaggaacaggggcatcaggccccccagcacgatgaagatggaaaacgcggccagcatgactccggaaatggccggtacctgcacgggttctgcgttttctgcgggcttgtcccagtacatggagcggatgaccttgaagtaatagtaaaacccggatgctgcgcagacgatcatgacggggagcatccaacccagatacagacccgtattgatgacgtgcacgaaagaaatcattttggcgaaaaatccggccgtcagcggcacgcccgccagggaggcgaacatgatggtgaccgccagcgccagccggggattggttttgcccagaccgcggaacgcggaaatttcctcgctcccgcgctggatgcggatcatggcaagggcgaaaaaggcgccgaaggtcatgaccaggtacacagccaggtagaacggggcgttcggagccaactggccgtccacagtaccgataaacaggggcagaatgaagcctgcctgtgcaatggaagaataccccatcatgcgtttcaggttcgtctggggaatggcgcccaggttgcccaccagcagggtggcggcggccatcagggctacgacgaattcgacgggaggcagcacggcgaatggggccaggatgatgccgaacagggcgaatccggctaccttggaggctacggaaaggaaagctgtcaccggagtgggagcgccctggtacacatccggaatccacaactgcatgggaactgcaccgattttgaatgctgtaccgagcagcagcatggcgagggccaggtacatggcgggggctgtctggccggccagggcgtggctgacgatcgtttcattataaatgaatgttcccgtaatgccgaaataccaggccaggccgaaaacgagaaaccccgtgctgacggcgcccagaatcaggtacttgatgcccgcttccgtggaacccaggttccgccggaagtagcctaccatgatgaaggaactcagggtgagcacttccagggagacgaacagttccaccaggttggatgccttgcacagggaggtgatgcctacgcaggccagcaggggcaggatgtagaattcccccgttccgtcctgggatttggaatcattggaggaaaggttgatgacggcccggaaatctacggaaagcaacagggtaactgctgtggcgacgagcgccaggatgatgtagatgttgtcatagagcccttccatgtagaagggaagcatcgccagggttcccgccgcgccaatcagcccgaaaataaatttgggcgtttttttgtagaaggtctccgccagaagcaaaagcattgccaggccggccaggatgaattccggaatatacgcttgcatgggtaaaagagaatcaggttagactaggtttgtattcggaagggaggaaatcaggagaaaaactggagcaccagcgtggggaagaagccgaagaccgccagggcgatgaccaggaagcagttggccgcccgttcggagggctgcagttccgtggcgtaggcggaggctttggacaaatctccctggaaaatattgcggtaggccctcagcatgtataccgcgccgatgaccagtccccagaggcacaggatggtggcgatttgaacggggccgaagccgttgctgaaaccggcgaaaccggagaagaagaccatgaattcccccgggaaattggcgaggccggggaggccgatggaagccatgcccgccaggccgaaaacgaaagccatgcgcggcagcctggtgctcagtccgcccagagagttgatttccagtgtgcctgtctgcttttcaatctgcccgcagagcagaaagagaagggagattgtcaggccatgggccagcatcagcagagcagcccctttcagcgcccagggattggcttccgcggaaccggaaactaccagggcggcgaaagccaggaagatatagcccatgtgcatcacggaagagttgcccagcagcaggtccagccttttctggttgacggtcacgtaccccacccaaatgacattgcagacgagcaggaccagcaggatattcgtccagggaaggaatcctgtttccatcagcggctggaacatgaagagcccgtacaggccaaatttcttaagcactccggcatgcatcatcgctaccggagcgggagcggatgcgtatgcgggggctgcccaggaatggaaggggaagagggaaatcagcgtgccgaatccggcgatgagcagggccccgatgagttccgcgtgggcaagttcgcgcccgctggccatgaagtctttcaggccggagaaggtgaagcctgcctgcgtgccgatcatcagcagggcagccagcagcaccatggaggcaagccccaggtaaagcgtggcgcgccaggccgtggtgcggcggtcgccgcgtccatacaggccgatcatcacgaaggtggggataagagccagttcatggaaggcgaagaaggagatcatgttgtcggacaggaacgccccggtggcgcctgcggaaatcagaagggcggagttgtaccaggaagcttcccccccctggggcgggttggtgcccaacacggtggcgaaggtaaccaggatggtcagcagcagcattactttggacagggccggagccaacgtgagctggaggtccatcccttcaaaacgggaccagcaggaagaacagccgtcaaagctaaccagggcccagatgccgagggccagcgtcagggaggcgctgagcagggctgtcgggcgtgcgggcgccttgcacagaccgatgagggccgcggcaatcagaggaatgagaacaagccagataagcatggtatgtgattggttggttaggttagcaggaatagaagacgataaagtagatgaccaggagcaggccaatgccgaagagagccgtataggcggccatgttgccggactgcaggcggcgcagcagggagcctatggcggcggtcaaccgcgccagtccgccaacgatgaggccggagatgatgaactggtccataaagtcgatgatggcggccagaacgccctggactcccctgaccagcactttatcatagaacagatcaatataaaggcggtttgcgagagcccgggaaacggcattgccggagagtttgtcagaagccggggagcctgcgtagaaggcagccgccagcaggattccgagcaccagcgcccccatggagacgtagaagggcatgcccatgtggaagctttcggaaacgaatccgttgaaaggaaccagcctgtctgcgatgaacccgtagccggagatgagagccaggacagccagaatcagcaggggcaccagcatgaggccgccaacttccgaggcgtgttccgaactgtggctgcggctcttgccgaagaaaaccacaaagatgacacgcatcatatagaaggttgtcagcagggctacgcccgcgccgatccagaagaagaccgggtttttgcgaagggctgcttccagaatggcttccttggagaagaagccggacgtgaacggaatggcaatcagcgccatggtggcaatgatgaaggtgagggaggtcagcttcatgcgcttcatgatgccgcccattttccagatgtcctgttcatggtggcaggcgaagatgatggcaccggcgcccaggaagagcagagccttgaaccatgcgtgggtgaagaggtggaacatggctgcctccccggccagaagtcccagggccatgaccatatagccgagctgggagagggtggagtaggccaggacgcgtttgatgtcattctgctgggtggccatgaaggcggcgatgacggccgtaatggctccgatgccggcaatgacattgcaggccagggcggggaaggcctcaatgccgatggagtattggacgcgcaccatcatgtaaacgccggcggctaccatggtggccgcatggatcagggcggagacgggggtggggccttccatggcgtccggaagccagacgtgcaacgggaattgggcggatttgcccaccgctccgcagaagaggcacagtaccgtaatgttcagcaggttttcactgattcctgcgggtatttccatcaggctgaaatccagcgtgttggtcagcgcccagagagtcagaatgccgatcaggaagccgaagtccccgacgcggttgcagatgaaggcttttttggcggcgttggcggcagtgtcccgtgtgtaccagtggccgataagcagataggaggagaggcccaccaattcccagaagataaaggtcatggcgatgttgttcgccaggacgatgcccgtcatggagaacatgaaaaggctcaggcatgcgaagtagcgtgttttggccttgtcgtccgccatgtaagccagagagaaaacatggaccagcaggccgatgcccgtgaccaccagcatcatgcgggaggaaaggggatccagcacgaaacccaggtccacggaaaagatgtcggaaatcgggagccaggagaaggaatcggatccggtccggtccagcagacccagggaaaagacgaaggtcgccaggcaggagaaggtggaggtgagggccgcgacgtcaggacgtttggtcagcaggaaccagtcaaaggcggctacgaccagcggcaggaagagcagaagccaggtgtattgaatatcaatattgaacatgttcgtggagtagtgtgttgctcttagtctttcagcgtgttgagatcttgcgtgctggccgtgcgcctggccctgtacagggagacgatgagggccaggccgatagccacttccgctgcggcgatggtcaggataaagatggagagggcctggccgtcatagttgggcaggcccatagtgccctgggcgcgggaaaacgctaccagggacaggttggcagcactgagcatcatttccaggcacatgaagatgacgatgatgtcgcgccggacaatcacccccatcaggccgatggcgaacaggacgccggagaggatcagataatgcgtaagaggtatcatggtgatggctgtggtaaggggttctttattttccggaagggcggcggctcagcacgacgacgccgatagaagccaccagcagggccagaccggcgatgaccaggctccggttgtatttgtcaaacagggtacggcccagcagggcggtgtccgggaattctccgttgtctatctcctcacggatggtggtgccttccggatagaggtgggcggaacattggggggagaggggggggagaatgacggaaggggcgccgttgttgcgaaggctacaggcgggagtttccattccggttttggagggggctgcgttctcctgcccgattttcaaatcgttccaggcctgttccgcgctggccatcgggcagcggtgcgtttctttggcgccgggcaaagaatagatgatgccaataagctggccgaggaagaggccggcgatgatgacaccgatagcgacggagaaaggcctgctgaagggggatgtttcctgcttcacattcagcagcatgatgatgaacgcgaagagcaccataatggccccggcgtatacaaggatttggagaatgcccaggaagtgggctcccagcccgatcatgacggcggcggtggctccaaaggaaagagccatcatcatggcggaggagacggggttgcgcatgaagacgaccatcagggacaggaccacggccagggccccgaaaacgtaaaaaagtatgtcgctggcaaagatgttcataacgtacgggaaatggagtgttcgggggttatttgtattggttccacttgttgaccagccccttgcgggtgccgcccagttcgtagagcttggccttgttgtggatggcctgggttttatccgtgggggtgaacaggtagttatggctcatgaagatggcctgttccgggcaggcttcctcgcacatgccgcagtagatgcagcgcagcatgtcaatctgaaattccctgggggctttttccactttgccccacggtccttcctgtatggggccgggggtgatggtgatggcgcgggccgggcagatgaattcgcagagctggcaggaaacgcagcgttcacggccgtcttcgcctttcaccagcacgggagctccgcggtaatatttcggcagatgtttgtcccatctggcttccggatattgcatcgtaacgccgatgccggaaccggccagttcttttttgttgcgggatttgcccagcagagccagaacgaggtgcctgatagtgagccaaagaccgccaagaatggattgcagatagaaccgctctccaagggaaatcttcggacgcttgatcgttttgaaggccataatagtaatgttgtcggaatgaagaagggggggattacttgacgaagtacaggatggcggctgtaaggaagatgttgatgacggccagttcaaagaagaccatccagccgagcttcatcacctggtcatagcggaagcgggggagcgtccaccgcacccagacgaagaagaaggcgaagaagagaagcttgagcacatatgcgatgagctggcagatgaccgccacccagttggctacgttttcattgagccagccgtccaggccgaagccgatggaccacccccccaggaacagcgtgatgacaagggaggatcccaccaccatggcggcatattcccccatgaagaattgggcgaatttcatggaggagtattccgtatggtagccgcccacgaggtccgtttcacattcggacatgtcaaacggcgtacggttggcttccgcaaaaatggaggtgaggaatatgatgaaactgatagctacgggcaccagcagtatccagcgctgccagctcaggccctcgccccacacgggaagcaggagccagccattggcggcctggtattccacgatgttggacaggtccagcgtgctgtaaatcatcagcacagggatgatggacagacccatgctgatttcataggaaatcatctgggctgaggagcgcacgccgcccaggaaggggaatttggagttggatgaccatccggccagcaccagtccgtacacggagagggaggagatggcgaacatccagagggggcctacgctgaggttggccaccgccatgttgacgtttccgtaagaggtttgaaggtctccggcgaagggaaccacggccgccgtcatcagcggtggcgcaagcaccaggatgggagcgatccagaagtatacgcggcgtacgaaggggggcgtgaaatcctgtttcaggaacagtttgccgccgtccaccatgggctgcacgagaccgaagatggggatgtcgcggtccaggcggaaaaaacggcacaggttggcgattttgccgtcatggggcaacccgaagtagtccagcgtctttttgaacggcaggtcggatttcatgccgaagcggcggaatatgcttaacggaatgccggcgcggttggggcctacgcggtcctggatccaggcggccacccggcgttcaatgtacacgcagaccggaatgaacagaatggtgatggcaaagcagatgacgattttgatcagcagagtgatgatataaaaccacacagggttgctgagcacctcgtcgcaaaaggttagaatcgaatcaatcatggcggattaacaggttgtatgcgtgtgaagtgtgattagcggccctggtttttttcgcgttccaccacgggaatggtgacgccggtttccagaatgggctggcccccgtctccgatggaaccccaggagactccattgagtgcgccgtattccgtgctcatggcggtgaggatgtccagggcggagttgaagtctttcagagcaggattgcctcccagcagaagggtgatgtctctgaaaatctgccagtcgtcccgggcgtatcctatgggctggatagcgcggttcaggcgttgaatacggcccgtgacattaatcatggtgccgaatttttcagcgtaggtgacgcccggcagaaccaggtccgcatggcgcgccgtttcattggcgctgtgggcggtcatgaacaggtagtccagcttgtccagatcttccgccgtgaagcctgcttccggggagatgaggtcttcccccagggagaggatgcccttgatggaaccgctgcgaactccttcgcgaatggcgtccagcctggaaccgggttcgatatccagcaccagcctggccccgttcgtgttcgggttgcgatccgcagaaataagcatgccgtcgctttctcccatgcggggaacgatgtccaccatatccgtgctgatttgggcggccagatggcggaccatgtaaagttcttcattggtcatgcgcccggaggcaatgatggcgagctggttcggagcaatgcgcttgacggcttccgcggcggaagccagagccggttcccaggtggaggggcggtggggcgcttccgcatccgtacggatgacgggctggggaatgcgggtttccgcattgatatatttgtagttaaggcggtgagagtccggcatccagcaggagtttacggcatcattctggcgcggggtaatgcggtataccttgtcttcccttgtccagagggtgatattggtgcccgttccgcagtccacgtcaatggtctttgtttccttcaggaaccagacgcgcattttaaagcggaaatccttggaagtaagggctcctactgggcagaggtccacggtgttcatggagtagttgctgtccagctcgcggccggggtaaaccgtgatggcgttgaaggtgccgcgttgggacatggtgagcacctcatcgtgcatgatgtcgcgcatgaagcgcacgcagcggccgcagagcacgcagcgttcttggtccaggttcacgcgcgggccaatgctcaggttttttccttttttggtctttttctcttcaaaacggccttccacctggccgtagtcgttggagtattcctgaagcttgcattccccggcctggtcgcagatggggcagtccagagggtggctggtgagcagaaattccattacgccgcggcgcgcttcactggccagggggctgtccgtgcggatgcccatgttttccgccaccgtgtttgcgcaggagatgatggggcggggcatccactggatgcgctgatagccgttttcatcataggagggtgtctgtcccggagcgagcctgggcggcatcccctgttccaccatgcacatgcggcaggagccggcgacagccagcttggggtggtagcagaagcacggaatgggcacgcccacggaacggcaggcgtctgcaatccgcgtgccgcgcgggaaccggtgccacgttccgttgatttggacgttcaccttgccttccgcggcggcaatgtctttggggagtttggaagcttcttcactcatgatgacggatgggagagggatggttttgagaactggtgttgcgtgctgctgtttagcgggtgaggaaacggttttgctccctgccttcctccgtgtggggcagacaggcgttgaatggatccgtcagggctacgaattcttccttgaatttggagaccatggcctgggtgggccaggaggcggcttcaccaaaggcgcagaccgtttttccttcaatctggttggccacttcaatgagcagatccacatccgacggggcggcttttccttccaggatgcgggtgctgagtttcatcatccacggacagccttcccggcagggagtgcactgcccgcaggattcatgggcgtagaaacggttgatgttgttcatggcccagggcatggagcgggagtcgtccatgacgatgaccgcgccggaaccggacatggagccgtgccgggcgatgctgtccagatccagcggaatgtcgaagaaggtgatttttcccatggtgccgtccggattctgcactttgtattccgcatccgtgcgcatgaccttggaggaggagcctccgggtatcacggccttgaactggcgtccgtcccgcgggccgccgcagacgtcatacagcagttcaccgaaggtcatggagccggagacgatttcatagaacccaggacgtttgacgtcgccggaaaccccgatgatgcgggtgccgggggaacgtttggctccttcctggctgtaggcttctcctcccatggccatgatgtgtttcacctggcagagggattccacgttgttgacaatggtggggcatccgtacaggccgatggcggccgggaagtaggggggcttgatgcggggataggggcgatccccttcaagggagttgagcagggccgtttcctcaccgcaaatgtacgctcccgctccgcggtgcaggtggatttccagattatagccggacccctggatattgctgcccaggaagccgcgttcgcgagcttcctgaagggctttgagcatgatttccgcggcgatgggaaattcttcgcgcatgtagatgtaagcctgatgcgctcccaccgcgtagctggagatgaccattccttcaatgagctggtggggatcctgatggacaatgtagcggtccttgaacgtgcctggttcggattcgtcacagttgcaaaccaggtaaacaggcttcgtgttgttcggcggaatgaaggtccatttcacgccggtggggaaccccgcgccgccacggccgcgaagaccggattttttcacctcgtcaatgacggccctgggctccatgccgagcgcctttttcagttcttcataaccgccgtcggccagatagcagtcaatggaggtattccagccctcgcggttaacgtttttcagaatgcggcgcgtttccctggggtggggttctttaccgggaagataggtgatgctcatggcgaaaatctggtgcgtgggaaatggaaagggttaggctgtctgatatttggcaatcacttcttccagcacttccggagtgactttttcgtacaggagatcgttgaccatcatgttggggccaaagccgcagttggccaggcattccactccttccacgctccacaggccgtccgggctgactccaatggggtggtggtggtcgatgccgtttttgtcaatgcccagacgcgtgcagatggcgtcgaacaggctgtccgcccccgccatggcgcaggaaagagtgcggcatacgcggatgtggttttttccagggcacatctggcgcagaccgggatagaaagtcaccacgcccagaacatgggcggcggagatattcagtttttctcccacccaggcaatggcgtcgccgctgatgaagccgaattttttctgtatttcatgcaggatgggcagcacggcggatttttgcttgccttccgggtaatgcgtaacgtattcgctggcggcggcgtcaagttccggcgttacttcaaaggccgggtagaaccgttcgcccgggctgggctggtgggcgatagtcgcgtcgatggcgttttcagcgtaatcggacatggggagaaagtttggtgtttgcgttgaagtggatgaaagtggcgggtgtttaacggtcgcattcgcccatcacgaagtcgaaggagccgagaatggccggaacgtcggaaaccaggtggcctttcatcagttccggcaggatggacaggttgcagaaggagggggagcgcatgcgcaggcggttgggaagcccgccccccttggagtccaggaagaaacccagctctcccttcgggttttccgcggcaaagtaaacctgcccggcaggggcgttcacccccatggtcgtcgtcatgaactggcgaatcagggattccatgtccgtcaggacttttttcttttcaggcagcgtgcctttggtgtctaccatgttgatggggccgtccggcatggtttcaatgacctggcggatgatgcgcagggactggcgcatttcttcaatgcgcacggtaaaacggtcgtagcagtctccgtgttcgcctacggggacgtcgaattcgtaattttcatatcccagatagggggtgagtttgcgcaggtcccgcttaatgccgctggctcgcaggttggcccccgtaataccccaggaaagcgctttttcacggctgatgacgcctacgccctgaagacggtcaatgaagattttgtttttgagcaggagggcttccgtttcatcaagggttttggccgcttcatcgcagaagacgagcacttccttgagcatttcattgggaacatcacgtgtctgtccgccgatgcgggtataagaggaagtgaagcgcgccccagtgagctgttcgtaaaaattatggattttttcacgttcctcataacagtacaggaaaacggtcatggcgcctacgtccatgccgtacacgcctacgcccaggatgtgggaggaaaaacgggaaagttccagggccagtacgcgcagggcctgtccgcggggcggcagttcccatcccagcagtttttccaccgcgcaggcataggcgatgttgttggacaggggggccaggtagtcaaagcggtcggtgtagggaacaaattggttgtactggatggtttcgcctattttttccattccgcggtgcagatggccaaccaccggatcacagctgatgatttcttcaccatcaagttccagcaccaggcgcagcacgccgtgggtggcggggtgggaggggcccacattcagggtcatcgtttctccgagcggttcggatgtattggtgagatagtctgcgttagcggctgtatctgcaatggcgaaagttttggtgctcgtcttcatgtggatgtccgtgcctggctgaacctgataatggtgccggatgattatgccacttcacaccatgcgggcaagccaaatgtcagtttttttggcattccggggaggtggtgcgcgagtctcctcaactgatgaatgttagtcctttctaacaataagattttatatggagcctgccgaatatgggaaaaagcggattaggaatccggagtcaacctacaaatttgagaaaaaataatttaatgcaaatttgctcagttatttccgaatggtgggtgccgggaaaacagggctgccgggccttatggctggacgtgtccgaacgcagcggaggagaatcttcttcctttgtagccggcctccctgcgtagtccttttcgggattcacgttatatgcggattcctaatccgttaggaaaaaaatatgttgaagccgaggagaatttttgtctttcccattgctgtaacattttcagtattatttattttatatattatttcatggttttcccctattgccggggattcctttattcacgacaggacggggtaccttgggcagtttcatatccgccatgtctggaaggcctgcgtggacagttacctgtattggaatcccaggctgggggaaatggctgcgttttttattacttctgctccccggctggtctggacggtcttgaatcccgtgtttgtgcttgcccttgttcttggcctttatgtgctcgctctggggagaatgcccaatctccggcgggagtgcggagcatggacgtggttgtttgctttaagcatgttcgtctcagccggggtaaccgtttattatgtctgcctgacacgcgcaggctccatgaattatgtgtggaccggatgcctgatcgtatggttcatgaatatttacagaaccaggtgggggaagcggataacctcccctcgatggggcctgtcctcaggatgtctgatttatgggattttctgcggcgcctgtaatgagggggcgacgataggaatggcggcggcgttttgcatcatggccgcggtcggcatgttccgggaccgcagggttggcgcttatgtatggtgcgggtttgccggcgttgcgttgggaggcctgtttctatttgccgcccccgggttgtactcgcggcttggccatgatttgggagcgagtgaagttttgaggaagggcggtttttgcgcctatgcggagtctttcgggatattgctttattaccacgcgaggatgctgtgtaaaatatatgccgtttccgcagtattaacgggatttttgttgttcagcggcacggagcggtgccgggaagtaatcaggaaggaaaaggaatccttcttttatattctttttttattgttgctggggggcatcatgtccgtttgttattttccggtgtgcattcccgcccatcatgttcagttcgtgtcgtccctgcccgttttggcggcgtcaaccgtgttgttctccgtattgtaccggaatgagatcatggtgcgcggattgcgcgcggtgactgtttgccttgccggagctactttgtttttcggggtggtgttcaccctggagtattatcatgtaggctctcaggctttccagagagaggagctgattcataaggccttccaggaggggaatctggaaccggaagttccttccatctctcctcttttctttgaaggaaaagtatccggaacggatgggaattggggtgggccggataccaaccgccggtttggcatccgcaagctggtagtgaaaaagccctgagggaaaatggctatttgactatgttccggggagtgaagtgcatttcctgttcctcgatgccgaattgccaggtggccgtttgccacatgttgacagcaggatttttccaacggacctggacggttacggggctgagccgcaggggacgggagggagtccatttcaaaattttttccttggcgtcgtaccgggcgtttaccaggccgaagccggagacgcgcatttccatttgcttgggttccaaggagggttcccctgccagggaaatggatatatcgggagtctggtttttcaccacggtattggcggccggataaacgggctgggccggggccgggtaggaattcagctttttcccgctgctgttgccaggggtggtcgccgggggttccggagtggagggaacgttgaaattcagggctctggtaaatgtcttagggtctttgccgaagaccatgtagcggtgaatccgccagcggtccgtgtccttggtcacttttttggggattaccgtaaaggccgcctggaatccggcttcttccgccttggagatcatttccggcaggatgaagccgccaggatagcaataggcctccacggaagaaccggggaatttttcctgaaggattttccgggaattgcctatttccgccgttgccagatccagaaccgcttgtgtacctttccgctgggcggccctccaggatcttgggtacaggtggctgacggagtggctgcccagggtggcgccgttattcagcatttcctgaatctgggcggggctcatggcagaaccgcggcccgtgatgaatttggtgtatgggaaaatggtaaaggggaatcccgtttctttcagtatgggataggcgtccgtgtagacgctcttccagccgtcgtcgatggtgatcatgacgcatttggccggaagctgcctgtcccccagtttccattccaggaattccttcatggagatgacgggcactccggacgccttcagcgcctgcatctgggagcggaatacatccgtattcatgcgcatttccgtagcgggaagggtgcggctgaaatcatggtaacccagaatggctacgcgggtttcatgctgaggaaccggaacgggggaaaaagccgtggagggaatggcaaggggtgcctccgcaggttgtaccggggcgtgcaggttcgtttccccgggaatgggttccgcgttagggatggactccgccaggggagcggaagaacctgtctctccgggaatgggttccgccatggggatgtattcatccttgcggttggcttcaatcaggtctttgacgggaacgatgccggcggccgggtttcccttgatggttcccccgatgaccgggccgggagcaaagggaaggggagacgccggcggcaggtcgggcggaagctccgcacatgcgacaccggctgcgatcaagaaaacggaaaggaggcctgggacggagcgcatatctgcaactactatttttaagttttctgttcaaccttaaactcaggcaggcatgacagcctgttccgtgccgcgcgcgttttttccggggcatgtctggattttcccgtttgaatgcgttatcgctaaaaagcatgcagactcattttccgctcgcggaagaaaggagaggcgtttagtctgtctgcagacatgagctgtatttgtcatttcttcaaagttctggcgcaccgtgcgggtctgctcactgccgtagctgccgccgcttttttcctgggggctcctgccagtgaagcttcggcccgcacggcggctcccgcttatccggccgtggaagtggggggggaatcccagtacagccattttcccattcctctcaatcagtacaatccggtgtcgccggatgccagcctgtaccaggtgcttagtgaacgcaacaagcagtccggcggtttcaacctggcagtgacgctcgttttcttcggcgctattatccatacgtttctggccggccgctttgagcgttattcccataagctggccctgcgctacaaggaaaagctcaaggaaaccaacttccgcgtgatgcatccggaagagcgcctcccggtttccttcgcgtccgccattttccattttctgggagaagtggaagccgtgttcggaatctggcttatccctttcatgttcgtgtgctggaagtattattcctttgaggatttttccgcctatttgaattatgactgttccttcacggagccgatgttcgtgatgattatcatgattatcgcttcttcccgccctattttcaagctggcggaatatgtcgtgaactgcggcgccaggcttgggaaggcaacgccgggcgcgtggtggatttccgtgatgtgcctggctcccctgctgggttctctgattacggaacctgccgccatgacgatcggggccctgatcctaagcaaaaaattttacgacctcaagccgaagaaaaccttgatgtacgccactctggggcttctcttcgtgaatatctccatcgggggcaccctgacgcactttgcagctccgcccgtagtgatggtggcggaaaagtgggactgggggctggctcacatgatccagcatttcggatggaaggccgtttccgccatcgtcatttccaatttggcgtattttctccttttccgcagggagttcgcccgcctggcttcccagcagagggagttcgacgagtttgacgacgccgttccccagtcctgggaagaccgcaatgacaagataccgttgtgggtgaccctggcgcatgtctgcttcctggtctggacggttctttttgcccatgagccggtcatgttcatcggcagtttcctgttctttatcggtttcacactggctacgccgcaataccagaaccaaatgtctctgcgcgtacccatcatggtggggttcttcctggcggggctggtcattctgggcggcgtgcaggcctggtggctggagccggtgctgacgcggctgggggactacgccatggtcggggctacgctgctgacggcatttaatgacaatgccgccgtcactttcctggcgtctacggttcccaacctgccggaagccgtcaaatattccgtggtggcgggtgctgtgacgggcggcggcctgacggtcatcgccaacgcccccaatccggccgggcaggccattctgggtaaatatttcaaaggcatcaatcccctgtggctgtttgcctgggcggcttttcccactgccatcgtgtttattttcttcacctgcttcggccattaatggccggagcgtactgtcactcttatgtttaccggactcgttgaaacaacaggaactgtggaagggtttacgcctattaacggcggagccaggctgacgctgaccattccgttcggccgtgaacttgccctgggggattccgttgccgtcaacggatgctgcctgacggtggatgccctggagggtgaacgcatctcctttgatctgctttcccagactctccgcgtcaccagtctgggaaccctcaagccggggatgctggttaatctggaacgcgccatgtccgccatggaccgtttcggaggccacttcgtgatggggcatgtggaccataccggtacgattgccgctctggagcctgcagggcaggatcaccgtttagaggtgcgcattccggaggaactcacccgctattgtattgacaagggttccatcaccattgacggcatttccctgaccatagccaatttgagcggctctctgctggagttctggattactccccatactttcggccgcacgaatctgcagaattccgttcccggccagccggtcaatctggaagtggatatgctggccaagtatgtagagagactgttttctgcccgtgaacaacgtgcggagggatagtcctgcccgtaaggagaatcacatgccgggcatgcgggctggtttttcctgccggacaatgaaagcgcattcctgttgtctgtagcagggatgccgggatgcggagttttttgaacaggaagccgggtattgctgttccgatgaaggaagggccgtgagggcggaacaaaaatgcggagcggatctatttgctaccgggccattcctccctttgccgtaatccatttcccgcgtttgacgacccgttcaaagaacagaccgtgacgttccgctgccgttttcgtttcttcccactgggaagccagaatgccggagatgaccaaagcggcatccttcttcatggcggcgatgatttgtggaaaagccttttgcagtatggttgaaaacaggttggcgacgacaaggtcaccctgctgggattccgaaggtttccatttgaagacgtcttccacaaataagtccagctgttccgccgtaacggcgttgcggaccatgttgtgacgggccacttcaatggccatggggtcaaaatcgaaagccgtggcgtgctccgcccccagcttcagcgccgccatagccaacacggcggttccgcagcctatgtccgtcatgctccatgatgtttttctgcgggatttggcagcgtcgcagataaaacgcaggcaggtggatgtggtagcgtggtctcctgttccgaaagccatttcggcggggacgctcaggatgcagcgcgaggggaactgtttctgcagagcggccagattctccggagaactctgctccgtaatgaccagtgcgtcccttattttgagcggagggcgtttttcccgcttctgggtcgctacccagtcctgcgtcttgatttccctgacagttcctccaaaatattttttcaaggccagggcgtcttcttcatcatcgcagtaaacggtgattcgaaccgttttcccccctttgatttttgtaataacggcgttcggatttccggcgatgcgttcgctccaggcgtcttcccatttggcggcggaaagtttgttccaactccatgtcatgcagaaagtatgggatttttccgtcagggaggcaagaatggattgattgtaactgcattcccgcagtttttgggattgtgtggctctattgttgaaaatttgatttattcaaagaagaatataaagcgtcaactatcaaaccattttattttcagtatggttgcgaatttggaatccggagtaaagattatttttttatattcaatggccaacctgtaagaagaggaaggaatcttgttctgtttcaatctttttttctaacaataattcattgattgttattttgttgttttgaatttcgaataacaacggattccaaattcgtacattaaaaggagcgcgtttgatatgcaaaaaacatccaaatgtacagattatcatgaaattatttgcttttgccatgttgtccttggttccttcagttactgtctgttccgttttttccaaggaagtggatatttattcaggaacatatggaaacgatgatgtggaagtattccagccggaggaagtgacgtatcatctggccggaagggatggcgtcttttatgaaggtgcgtttacgtttgataattataatccggacaagggcggcgccggaaacaggcagggtgttttctccggctatagtacacatttttccagcacggaaggaacgtctctcggctttcactgcaccgggcttaatcccggaaagaacagttccgcttccaaatcttttatttttgtcatggggccatgggaaagcggggaggagtttgtcgctcctcaggttacttttcagaatttgggcgatttgagcttcattgcggataatatggacatgatcggcattaccgatggcgccacggccggaaccggtggcgggaggtacgggaaagctgatattgtttctttcaacaatgtaggaaatatcagattccgggggctgaatcatgggggtataggcttcagccgtttgaattccttggcttttaccaataccggggatatttcttttacggatatgaagatgggatattcttccaatggcggtgccatttttattaaccaggggggggattcttccctttactccaatcctggagatgggaatatttcttttgaccatacgggaaatattatcttcaggaatcttgttaaaacttcttattacatgagttctgcggggatttttaccaatgaagggagtatttcatttaatgatacggaaaatatcctgtttgaaaataacacgtccaccggaggacctgcggcgataggcattggatccatattcttaccggataaccagccgtctttgtcgtttagcaacatccggggagatattatttttagaaataataaggcttccggagggagcatgccggggatggcgggcgctatcactatttatggatcttttaagctggtgcaaacgggtgatgtcctgtttgaaaataatgtgactgataaaaatacggccggagccatttattgcggcaataatgaagggaaaaggtttggagggcaatggcttttgtctgcggatggcgggaatatcgttttccgaggcaacttggttaaaggaagttcgggggtctttgcccgcgccctggggatttttgcttatgctcccgaaaacgattatacgggcatatctcagcccaatgggaatttaaccatggatttccgcgcccaggccggacgagaaattgtattttatgatggtattgatattgaaagtattactgtagccatgcctaccctgcatattaacagaattccggccgattgggcagattatggaggtattcctgtggagtttggaggaaccgtgcgtttttccggtgcattgacggagtcgtttctagttcgcaatgacggggaaagtgatggtgattacgcggaacgggtggagacctcccgcagggtgaaacttgaatcaaatattattgtggaagggggacggctggttcttgaatacggcatgaacctggcgaatgagagtggggatgtatggcagggaagttcaagagtggagcaggacaaaccggtgtttaacctggccggcggagtgctggaaatgacgtccggttcatccatcagcgcccagcaggtgattgtttccggccatggcagcggcgctatcctgcgggtgggagccgctcccatcggttccgacagttgggaggggaagacctatgaactgccttccctttccgctgtcaccattgacatgtcccacgggtttgactgggatctcatgcctttctcggaacggggggacagcggtatcaacatcaccgcctccggggaatttttactggggggaaccattggaattgcggatacgctggatgattacgcctccgccgcctggggaagggacagggagtttgtcatttttaatatggattcttccagcaaacggccgcaaggagggctgaaaggggttatttccaatacgacccagtcatccacggttgattctccctatacctacggcggtacctgggaatatgaatggcgcgacatggatggagatggagaagatgaccagctgttggcaatttggaaacatgaagccggatgccgcccggatcaggtccgtccggagcaggctggagagcttgctctcaattccctttggagttccgcttcaaacgcggcttctcttgggaatactgcgttggcgcagttaaccccggtgcggttgtatcagcggtatgcacgcaatgtatggggaatggggctgggggatttcgcccgccagcgttcccggggcggcgtagatggttatgactatgacgggggcggatattccgttggcatggattccgattttggaggaaagagcgggatatgggggatagcgttcggacaaatgcacggtttcagcaggagccgggattttaatgggaggattacccaggattccctgatggggagcatttattgggggcggatattccgctccggcgagcgttccctgtggacggtgaaagccgatcttacttggggaatgactgataactgcatgaaaagccggttcagcaacggtatggacgctcatggggaatggaacaacagaacgtggctggtccaggcggaagtttccagaagcattcagtatgcaggaggatggactgtgtctccgtttttgaggatggagtttacacatggcacggaggcttcttttcttgaagacggcagctatgccagaaaatttgaaggagcggttttgcgccggttgtccatcccggcaggtgtgagtgttgagagaagtggtgactggaaaggcaggcactggacgcaggtgctccgcctttcctatgtgggagatgctattcaggatgtgccggaggcttccgtttacagcatatacagcgacattttctggagggcccgtggtgtccaaccagcccgccatgccgtacgcgtggagtatgatgccgccttgcagtggaatgaccgctggacggtttatgccggttatggcatggaagcccggggaagctccgtgtaccaccgcataaatgcgggcgtatctagggcgttttaggaaacgtcagcacggatagaaaaaagggcacgttttcgaaggaaacgcgcccttttttgatactgcgggggggatgttccggcagggggggacagctacaatgttttgccgttcggccacatcagcatccgtttcaggaagcgttcgttgttgacggtgatcttcgggaagaggcgtttgctggattccttgagcgccctgatggcgtcttcaccctgcagcggcgtgcggccggattcgtcgatgatggtgcgcagccatgcggtctgtggcatgccgcatgcttccacggccttgaagggcatgcgttccctccagttggtccctcccgtagtgccgggaatattgagccgtttgttgatgccgaagagagcaggccagagaatggccgcataacgggaacgggaacggaacagagcgttgtacatggccgtcttgatttcctggttccagtaggaaagacaggtttcaggctgcatgccggagaaatccgcaaaccatttcagaaggcgcgctccgtcctccgcctggcgcacgatgttttcctgttccgggctggacggcgtttttggggagccgttctcccacaggcccagcttgcgggcgcgttcgattttcgcgtagctgtcgttccatgtctgcatgatggtttcgaaatcatgcgttccgaacgccgcaaaggagcattcgtgatattcttttccagacgtaatggttccgtccgccttgatttcccagtggggaattttgaaaccggggatatccagctgccgcatgttcgggcgcacgtagtccggaacgcagcctaggtcttcccccaccacgctgacgccgggggcggcggaaagcagaaggcgcaggtacaggtccccgtccgccaggttcatgttgcggtccgctgcattgtcatccccgcgcggcttgaagccgggcagccttccgcccgttctctgggcagcctgatcgggggaaagcggcaggaagaccccgttttccgtgggtttccacgggaaggagtaaatgcggtaaaagcccaggatgtggtcgatcctgtacatgctgaaaatcttggtgcagtattttacccggcggcgccaccaggcgaagttgtcctgcgccatgacatcccatctatacagcggaatgccccagttttgcccccatttggccgtgaatgggtcttccgcatagctgccttccgccggggctcctccgcaccattccgtgtcaaacaggtggcgttcaaaaaagacgtcggcgctggaaagggaaacgccaatggggatatcccccatcagcttcacattgcgttcgtccgcataaatacggatgaattcccactgtttttcacagagccactggagccagcgggcaaaatccttttcttcctcgtaatcggcggcaatggccttggcccgcgccggatcctgttccggccagtgccaccagatttccgtgccgaacaggtcgcagagaatctggaaacagacaaagtcttccagccagctcccctgttctttcacccattccctgaatttgggcataatgcactcatattccggcttggttttgaaattgttccaggctccccgcagaatccacattttccagaatctgaccttggggtagtccaccagatccgggccggagggctgttcccacggcagcgtgtcccccgtttcattgaatacgcgttcttccaggccgggtatggtccagggttccagggaaaggtacaggggttccaaagctacggaactgatggcggaatagggggaggggcattcgtccctgcccagggcattgacggggagcagctggaggaaccccacatgggcatccgccgcccagtcaatccattggcgcaaggccgtcaggtccccgattccgtggtcattgttacggcgtagggagaacaatggcagaactacgccggctaatcttttctcatccatatcagaacgcattacttgagcggttcccccggatggacctgcgtcagccgttggaacagtaagcgccagaatagcatttccggcaggaaggcggcaagcttaatacgttgtctccgcgccatgctttgcggtttttcctgggaactggagcaggggggacggtaagacaggctgtttattttccgccgcagaaataaacgcctcaccgggaatccgattatttgttcgggatgcagttcggaagcggcatggttttctctgcgggaaacagcatgaaccggagggaaaggcggaatttttcttttagaaacagtctctggcggaaacaggcgcaaattctgcttccatccgtaatccccggcaattaagataatctgcaaatgaaattgctttttctcccttccgctttgctggtgctgctggcctcctgcggtccgaacaagcatgtgaatgcctgggaccgtcagagttctgcgttggatcccgtgggaatcacttccaagaaaatggcggctaaaaacaaggcggagcaggcattttacaaacctggggaagccgttacgttcaagaaggacagaatgatggtgtttgaacagaatccggaaagtaatttttccacaagcggaaccgtcaggggtggggtgaaaaccgggaaggtgctggtctgcggggatttgttcgccaaagtcgaatttgaagacggcagccagggctacgtcagcctctcggagattgttaatccgcaggaaatgatgggtttttatcctgtttccgcttccgatttaattggtccggacggaactttgcttcctttgccctcaaacatgggcgccgtcagcccggaagccgccgcttcccgtgagctggatatatcccggatgaatacctctcttgttcctgttccgaattccgtttctccgtcgggagctgcgcctcaggaagctcctccggaaaacgttcccctgcctgaatccagcgtgaagcagtagggcctttgcagaaaatccggaaagccgggcggaaaacaggaggcaatatacgtcggcctgcgcttcgcctgtatttttgttcccgggttctttctgacaggcacggaagcaattttattccgccgtcaattcatacgcaacggcatccgttacggtgacagtggcgaattgcccgacgggcagcgtcagaggaacggagacggttccgtcaatgtccggagcatcccattccgttctggcgactccgggagcatccaccaacacgcgtatttgcctgccgatttgctcctggcccgtttccgaagcgagacgcgccagcaacagggtggcttcattgtagcggcgagccttggtgcggtggtgcacctggttgggcatcttgtaggcttttgtcccttcctcccgtgagaaggtgaaaatgccggcgcgttcaaaacggaattcctcgataaactccatcagttcctgatggtcgtcttccgtttctccggggaatccggtgatgaaggtggtgcggatggcgatgcccggaacggccttccggatattccggagcaacgtgcggatatagtctccgtccgttacgcgctgcatggcctccagcatatgatcggaaatatgctgaaggggaatgtctacatagcgggccactttggggcattccgcaatggctgcggtcagttcgtcgctccagtgggcggggtgggtgtagagcagcctgatccagaattctccctcaatggcgttcagagcgcggagcagggaagccagggattctccgcgggaggaatccaccgcgctgcggcggtttgggcgcgcatccgtccatttatccatgccgtaataggtgatgtcctgcgcgatgaggcagatttccttcacgccggaccggataagggtttccgcttcacgaactacgtcctgctgggaacggctgcggtggcgtccgcggatcatgggaatgatgcagtaggcgcagccgtggttgcagccttccgctattttgatgtaggccgtgtgcggcggggtaaggcggtagcgcggcgtgttccagtcaggaacgtacctgcattttccttcaatgaagttccggtcctgtatggtccggtccatcacttgagtgataatttccgacagtttggtgatttggtccggaccgataaaggcatccacctccggaagcagggcgggcagttccttccggaagcgctgggacaggcagcccgccacgatgagtttctggttttccggataagccccgttttcccgggcacgcacgatgtccagaatggcatcgatggcttcctgcttggcctggtcaatgaaagcgcaggtattgaccaccattacgtccgcgagttccggttccggagtcatggtcatgccggctttttgcaggtggccgatcatgatttcagagtcaaccagattcttggggcagcccagggaaatgagtccaacggtgagaggcatggcagtagataagaagcgtgatggcgtcaatccccggagggggagtcgtccttgacgacgacgaggtcgaatggccggatgtccacgacgcgcacaggggtacccttaatcagtatgccttgtcgagagaaaacctcgcatatttcgccatgaatcatggcttttccattgggtttcagctccgtgacggcgttcccacggtctcctacctgaacgcgtgcgatattgaccgcttcaccggcggaacctccgctgaccgtggcgttggtaacgcggcgcatcaggatggaatccgggaggtatttcatcagcagggcaatcagaagggagcctccggttaggcccagggccagtttcagaagggggatgcccaggactgccgccagcgtgttgacgtcatcccactgtccgtcccggatgatatggtcccattcccaggagctgaccatgccgccgaacagggccagaaagatgcagacgccgcccgcaatggccgcaatgaatgtgcccgggataacgaagaattccacgcaaaggaggactatgcccagaacgagcagggccgccgtctcatagccggccagattcccggcaatgttgttgccgaagaagaacagggcaaacgcggcaatggccacaatgccgccgataccgaatcccggcgttttaaattccatgtaaatgccgccgatgcccagcaggatcaggatgggggaagcccatgcaatccagaggccgatgcgctcaaaggccgtaggttccgccgtgaccacgggggcatttactttctcctgggccagcaggtccgtgacggaggaggctgtgccctgggccagcaggggcctgccgtcttccagacgcgcggcggcttccttgcccgtcagggtcaggagcgcgcctttttccagtttgacggggccgaactgctgttcctggtcggacgggatcatcatggctttcaccacttccgggcggtaacccttttccgtcacgacggagcgggtaaaggcccagaaggcgctttccgctttcttgcgcatgacgggatccatttcctctccggatgaggtgatgatgcccgctgcgccgatggaggagacgggagccatgtaaattttgtcgcacgccgcggagatgagcgccccggcggacatggccctggggtttacgtaggcgtaggtgggaatggtgagcggctggatgcttttcatcatcatctcgctggtctcccaggccaggccgccgggcgtgttcaaatcaaatattaccgcgcgcgcctgctcctcctgcgctcttttcaggatgcggttcatgaagccgaagctttgtttgctggtcagggagtcctcccctacggggatgacgactaccctgtcgcggaaggtttcctccgcggccgcccggaagggggcgccggcaaacagggccagcaaagccagcaacagaaggtgaatgcgcttcatacggacaggctagcatgttccgctcccgcgctcaatggggaaatgtgttcctccggggcgggaaggcgccggtgctgcgccgtcttttcccagcctgtggaggccttgtttcctcgcatggcgttccgattctgtattcttgtgcacccataccccttgtgatagactggttccgccttatgggaaggattgatgaagacagtatccggcgcgttctggaggccactgacattgtagatgtggtgggatcctatcttcccctgaaaagggccggttcccggtggaaggcatgctgcccgttccacaatgaaaagacgccttcctttattgtggaccagagtcggcagaattttaaatgctttggctgcggggaaggtgggtctgccatcacttttgtgatgaagatggagaacctggggtttgcggataccgtgcgaaggctggcggaaaaagccggaatctccattgtggaagaggtctatgacgcagcggaggaaaggcggcgcaaggcacgcacggctttgctggtggcccacaagaaggctgctgggtttttccacaggctcctgctttgttccccgaaggcggcggaggccagggcttacctgaattcccgcggatacggggcagacatggcgaaacgctggcaggtagggtgggcacctgactcctcgcgggagtttctggcctgggcccgcagggaggggatcccggaccaggtgctgatagattccggtctcgccaaccgcggagaacggggagatttgtacgcccgcttccgggacaggctgatgttccccatcaacaatgtgtacggagaatgtgtggcgttttccggccgcattctgcggcctcaggaaaacgtaggcaagtacgttaattccccggagacggccattttcaaaaagggggacgtggtgtttgccctggacaaggcgcgtggccctatgggaaaaagcggcaaagccctgttgtgcgaggggcagatagacgtcattgcctgccacgaggcgggtatttcttttgccgtagcccctttggggacggcgtttactctggagcatgcccggattctttcacgctatgcttcacggatagtgttgtgttttgacgcggacaaggcgggcatggctgcggcggaccgggctttccgtgaactggccccttttggcaaggatatttacctggtgaaccttcctgccggggacgatccggattctttcatgaagagggaggggaaagaggctttttctgggatggtggaacgggcccgttccttctttgaggttcgcattgaacgggccagggagagcggtttgttggatgacgccgcttccagcgccgcttttgcccgtgagatgacggccctgctggcctgcatgagcgatccggtggcccgggacctggctacggctgacgtagccacgcgcatgcgcatggctgcggataatttgcgcggcgccgtcagaatggccggacgccggaaggggcaggaacaggcccagtccgcagagcgtaagacggctgaggaggtttcgcagcatcctcctgtgaaaatggatcgcgccgtggccgtgctctgtgaactggcccttcagaattcccgtgcccaggggcttatcgtggaccgcattgaagaattgctggagccgatgcggctgctgcagggcggaggcatcttaaaaaaaattctggccaggctgccttctccggacagccccgcggccgttcaggcttttctggtgtctctgcctcagccggaacgggatgccttgggcatgctgaatctggagcccatacctattcccgatgtggacaggagcgtacaggaagcctgctccggcattgcgaaggccgctttggagaggcacatcgcctccctgatggcggaactggcggatccctccacggatgctgccagaaggctggaattgtccaaacttagtgttgacttgaagcgtttgctgggtacaatgtagtgcctcgatacctccgggtattgatataatggtgaattgtgccctcttcttttcaagatatgtccaaatccggtgacccatccccctcttctcccaagaagacttccgccaacaaaaaagcttctgaatccaaggaaaaaatagcggcccggcccgccgcaaaaaattccaaaaccgctccgaaggcggctcctgtcaaaaaaaactctgccaaggctgccgctccggctgcggaaaaggccgccgccaagcccattgcggaaaaaaaggccccggcaaaaaaagcgtctccggcttctgcctccaagaaggcggcgccgtccgccaaaaagactccggcaaaggcgcctgaagctgtccctgccaagaaagctccagccaaggctgcggagaagaagccggctgagaagaaggccgccaaacctgccgcgaaggaggaaacgcccaaaaaattaagcgaaatactggaagaggaacgcaagagggctgccagccgcaagatcacgaatccgattgacgctccggaaattcaggaaaaaatccgtgaacttatcaagctcgccaaggaacaggggtatctgacttttgacgatattaatgactcccttcccaacgacattgtcgatcagcaggattacgaggccatcatggatcgcctgcgcagcatggcgtttgacatcattgacgcgtctgatgtggacagctacacggaccgcacccgcatcagcacggaagaagaggacgaagaggaaaagctcgaagccaagatggacattctggatgatcccgtccgcatgtacctgaaacaaatgggccaggtttccctgcttacccgtgaagaggaagtggccatttccaagagaattgaggacgcggaacagaacgtccagcgctgtgtgcaccgcttcggtttcatcgcgaatgcctatctggacgtagcttatcgcctgctcgacaatgaggaacgctttgaccgcgttatccttgacaaaaagatagactcccgtgagcgctatatgaaagggctggcccagctctgcgcccagatacagcagacccatcaggacgcatccggttccttccgcaagctgtaccgcagcaaggaggcggccaagtccgtcaaggcccgccaggccgaatttgacaaagttgccggcgctttggtgaagttcttcggtcgcctgtatttcaagcacaaggtgattgaggatttctgttccatgattgacgaggcccgcgaccgcgtgctccgcatgcagaagaaggttgccttggaaccggacaacaaggaactcaaggaacatctggcagagctggagcttcgcatgtggatgactgcggatgagatgggagatgcctaccaggaactccgcaaatggcttcgcgaagcccgcagggccaaggatgaaatggtggaggccaatctgcgcctggtcatttccattgccaaaaaatataccaaccgcggcctctccttcctggatctgattcaggaaggcaacatgggcctgatgaaagcggtggaaaaatttgaataccgccgcggctacaaattctccacctatgccacctggtggattcgccaggccatcacccgctccattgcagaccaggcccgcaccatccgcattcccgtgcacatgattgaaaccatcaataaattgatgcgcgtgcaaaagcagttggtgcaggagtacggtagggaacccactccggaagaaatcgcggaagaaatccatctgcctgtggaacgcgtgcgttccgttttgaaaatggcccagcagcccatttccctgcaagcccccgtgggggattccgacgatacctcctttggtgactttattgaagacaaggcggcggaaaatcccatggaggaagcctccttctctttcctgaaagaaaaaatcaaggatgttctggacaccctcacggatcgtgaacgcgaagttattgaacagcgcttcggcctccgggacggcagtccccgcactctggaggaagtgggccgccagttcagcgtcacccgcgaacgcattcgccagattgaagccaaagccctccgcaagctgcgccatcccacgcgcatcagcaagatcaagggattcctggaaatgacggaatcctgaccggatttgcgccgcatgccgtgctacgctttgtggtcatgaagacttgcgtagctgcggtatgcggcatgttcatgttactggtttcctgttccggcagcagggaattcaaaccggcgttcaatcagccccttcagcccgtgatgcagccgggctttgtgtatgtggatcaggtggctccgctggtgaagactaatttgaaatatgccgggtatgacaattttgtagggcgtccgctggacggttaccacggtcggcgcgccatcctgcgcacccaggcggcgcaggcgttgaaaaaagtctcggaagatttgtatcgtcagggttacctgctggaaatttatgacgcctaccgtccccataccgccgtgctggacatttgcaaatggggagctgacgacggggaccaaaagatgaagtcccggtattatccccatattgacaaggccaaggtgttcggagaccactatgtgcgcgatttttcggaacattcccggggtgtggctgtggatgtttccctgctgtacgccaagaccggaaagccggtggatatgggcggccatcatgacctgctggatcccagttccaccacagactccacattagtgactccgtcccaacgcagaaacaggatgattctgaaaacggcttttgaaaaacagggttttgccaattatgctccggaatggtggcactatcgcctgttgaatgagcctgaacctaccctgcattattactttcccgtgtgggacggcatgacttccgcgggcaggccataaaagaattttacatatcaaattttgtaaaaatttgtttgttagctgagtggtcggctccgtgctgattcctatcaagcagaatgtagaagatcgtactgacacctggaaaggatacattagagtagaaaaagcagaacggcattatttcctcatcgacggagacgatgttatgactctccaatggcgcgagtcatctatgcggaagccgatacgaagggtgccgagataaggacgagtgcattggtgatgttgaatcgtcccggcagcacgaaagggaatgcttatcgaaatcccttgttgagtatattgacggaatttggcgaaatcaaagacggtaagaatcctgattgggcctccgtaataaatcagcaatatgccaaggttgaagtggatgagtacagggatattgacaggctgagctgtgaaaaactagaagaagccagaaaggcgctccttgaggttctgagcggtggcgtgactgttccttatgatgaatttagaacggcagtcactactcccacgcctcatgtcactattggcggaactgactttttgactgaaaagcagtatcggaactgtattgtcaaaccagacggatgcgatagtttgtctgtctggcccggtggacctttggatagataaatcattctgaagcatcatcaggcggatcaggtgattgagacttgagccgtctttttgacgaagtaatatctggaggatgaatgcctctcttaaaacgcttcttttctcttgccgcacggttccccttgttatggcttttgacgtgccttctccccttgtcgatcatcctccggtggatgttgccgccttgcgttttcacaagcaggagatgacttttctggaaaactgtttccgggagaatccggataacaaagtaatttggcaggcggaccatgaagtcgcattagtgtggagaacgccgaggggagccaattttaacagttatgaatttaaggcttttctgcgccagcaggacggttcattcatggaaatggggaggtattccgtcatgtctagctatggatattgggatgaaaaaaatatccaattctccgataaaggatttcaggttgttttaattgcggatggaggagcaacgcatgcaagtcatcagttctattattcccaacctgccgctacctttgttttccggttgggccgggaagagggcaaatgttccaacgaggaagtgtggatggacaatggcagttgatttccaaaccggtttgtctgcaatataggaggggaaaagtgcagtttggatgaaccccgaccattccttgacgaagaggtttttttgttgcgggcgtcttggccgcgcgtatcgggggccgtaaatacggacttttgatgaaaaggccgttccgcggtaaaggcggaacggcctgaaaagcgtttatacgcaggagatgttaatgaggcaggcggaagttgcggttaaacgcggaaacttcttccttaagctgggagaagccttccggattcgggcatacctggtcacctacgtacaaggccagcgcacgcgcaatgaattcagccacctgttccacgtctttttccttcatgccgcgagtggttacggcaggcgtaccgatgcggatgccggaaggtttcatgggagaacccgtgtcaaacgggatggcgttcttgtttacggtgatgcctacgcggtccagggcttcctgcgcgtctgcaccgttaatgcctttgttgcggaggtctaccatgaatacgtggttgtccgtaccgttggagacgacgcggaagccgagttccgccattttggccgccatggccttggcgtttttgacaacttgggccgcatagtccttgaattcgggcttcagagcttctccgaaacaggccgccttggcggcaatgatgtgcatgagggggccgccctgcattccggggaagacggctgcatccagttttttggcgtattcctccttgcagatgacgaagccgccgcgggggccgcgcagggatttatgcgtggtggaggagacgaagtccgcatggggaaccggattcgggtgctgccccccggccaccaggcccgcgatgtgggccatgtccacgaacaggtaggcaccgcaggccctggcaatctggcccatgcgttcaaagtcgattgtgcgtgagtaggcgcttgctcccgccgtgatcatttgcggctttacctccagagccagtttttccaaagcatcatagtcaatagcttccgtttcctgggatacgccgtagtgaaccacattgtacagtttgccggagaagttggcccggtgtccgtgggtgaggtggccgccgtgggagagatccatcgtgagaatggtgtcgcccggcttcagaacagagaagtaaacggccatgttggcctgggaaccggagtggggctgcacgttggcatgatccccgccgaaaattttcagcacacggtcaatggcgagctgttccactttgtccaccacctcgcaaccgccataccagcgcttgccgggatagccttccgcgtatttattggtcagcagggagccctgggcttcccggacggagggagaagtgaagttttcggaggcaatcagctcaatgttgttgctttcccggcgtccttcctcctggatgaggcccgccagttccgggtccgtccattgcagggggctaccggaggatttaacgacgcggcgttcatggcgtccgccttcaaagtcagcatgcagccaggcgtccaggacgtcttccacactttcattgtccacataggcggaagccaggcagagcaggttggaatcattgtgctggcgggaaagggccgcagcaggggccgtgcggcagagggcggcgcggacgcccacccagcggttggcggcaatactcatgccgatgccggaccggcagataaggatgccgcggtcgttggtgccgtcagcaatgctgcttgcgactgcattggcgtagtcggaataatcacaggaatttttggtcatggttcccatgtcggtcacttcatgaccccatgccttgaggagttccgctacggtttccttgagatcgactccggcgtgatccgcgccgatggcaattttgtatgtcgtattcatggtggtgctcattgctgacgggcaaaaatactgccttatttccccccggctggcaagccccggattcattccgggccgttcggaaggcacggctcccggaattgcccccgtgaaaaagaaccccggttccctgaatggggccggggcggcaaggaggttcgcgaggagcgagccgttattttccggaggattccagcttcagcatatcctggacgatgttgatgccttcgcggagttccggatcaaggccggaggggtattccggggagtcgtccagttctgccgtggggtcttccgccaggtgcatgaattgttcattgtctttttccggatccgccaggggcagctccttagcgttgacgtcgtccagcgtcaggcggtaaattttgtatttggtagcgtcttccttggccatttccgcgaagcggattttacgttccttgttgatggatttgcggcgttcttccagggcggagttttcctgttcccggattttcttgttcagggaaagcttgttgtccttgatgcgctgtttcatcatggcgatatcttccctggcaatctggaggtcgcggtctttttccacgcgcttcgcgctggcatctttcagcacgggcagcatggccgcgatggaggagtcctttttgtagttggtgcagggcgtaatctggtcatagggcatcgcgtagtccagaatgtcttctcccagctcgaatgccgccgtagcggtgggaagctggatatcgctttccacgcctttgagctgggtggagccgcccgccacacggtaaaatttctgggtagtgactttcagcaggcccgcacggtctctggccgcgaagaaaggcaggtattggccgatgtccacaggctgctgcacagaccccttcccgaaggtggattcatcccccacaatcacggcgcggccgtaatcctgaagggccgcggccagaatttcagaggcggatgcgctgagtttattaatgagcaccacaatggggccattgaagagtttctggcggttgtgagcggatttgatatccacgttgccgcgggtgtccttgatttgcaccacggggccgtttccggtaaagaagcccgtcatcaggcgcacttcctccagggaaccgccgccgttgctgcgcaggtcaattaccaggccatccacattttccttgttcatccgttccaggatttttttgacatccttggcacagcggcggtctccgccttccatgtctgcgtagaaggagggaaggctcagcacgccaatgcggttcctgccttccggagctccggtaagttcaatgatttcacctttggcaagttcatccttcagaggtaccttggagcgggtcagcgtaatgattttggcctgtccgggggcgtctgccggctctactttcaggcgcatctgggtattttcggctccgcggatcatatccaccactttgtccagcttcatgaacaggatatccaccatttctccggagttgtcggagtcaatggcaacgatgcggtcgttcagcttcaattctccggatttgtcagccggtcctcccacaacgataccggtaattttggtggaaccgtcgtcttcactgcccaacagggcgccgatgccggtgagttccgtacccatggagattttgaaacggtccacctggcgcgcacccatgtaatccgtatgcgggtcatacgtcaaggctacggcgctgagcagtgtttccgctacgtcttccagatccgtttcctgaatattgcgttgaatgcgttcataacgcataagcagtttttcctccgcgggtttttcattggccaggggatcgggcttgttctgttccttggccaggcgcgctacggtttcacggcgcaggatttcggacaggagctgttcctccaccatgtctttccagacctgctgcatttccgcctcatccttgggccacgcggctgttttgcggcgggaacgttcgatagacttgtctttgtcaaaggtgaagcctccctttttcagcaaatcccgcgcataggagatgcgctgcatggcgcgctggcggtaaagggcgtgcatggcctgggccgcatccatcatctggccggacataaggtagtcgtccagctccttaccgtattttcttttgagtgcgtctacgtcctgctgggtgaagaatattttgttggggtctaccttgcgcaggtaggtttccaggaatttagtggatagttcatcgctgaattctttgcgggagaagtggaaattctggagcagcagggacatttgcttgcccacctggttgaagtccgtagccgcagaggcgcaggaagtaatggcggctgcggctagggccgagaatgcggtgagtctaatccaacggaatgagtgcatgttcataacggaaaagggtgcgtttttttccatttggggaaaaagctgacgccgggatgtaagtgttactgatttgcaggtgattgtctatcttataaaacgtccacatgacgctattttgctctccttgtttccggaagaggacaagagtaaatggaagccggttcatccggaaatatccggcggcggcagggggaggaaagaagagaattcatgggtggataaatccaccataaagtttgaaattttgtgcggaagtccggcatttgtcatattggagctgcatggaaatggatttcattttacggatgttttttccgctttttgttgttgcgtgctttctttggttttccgttgctgcatccttcccggagagggaaaagtggcgggatgactgctttcctgtttgcagcggagagggtgaggatggggagaacgaacgttttccgaagagacgccgcaggaaaggaagcatttcaggattgaggttgcaacggttttctgtacacttcgcgtgatgatgagcataccgaatcgggacaagagtttttccggaagcaagatgggtgttctggtgcagcgttcattcagcaccgtggttttgcttgggttgctggccggggctttgtggtgggactgcgaacttgggtattacggtctggtctgcattttctgtattttggccgcttgggaatggcggcacatgctgctgcgttccggaaaagcctcccagccgaacttgagctttcttttcggagtggcgtaccccgtattgctgtcctggtcatgctgcatcactaaattccgggaaagcgcccttgcggaacaggtttctttcctcatcccccttcctcttctggtggcgcttgccgctccggtcctcctggtagtggttgccttcatccgtgagatgaagtacccggtggatggaagcagggctctccgttccgtgggtactacgctgctttcctttatttatcccgtctggctgttctcttttgccattctggccctgcatctggcgtatatgagggcggggtatgtttatccggccattgtcatgtgtgtgctgtgggtcgttctggtaacgaagatggcggacatttttgcctacgtgagcgggttcctgctgggcggccgccttttttcccgcaggctcattccccacatcagccccaagaaaacgtgggagggcctcctcggttcctgggtgctgacgaatgcggcggccatagggctggttttcccgatgttcggaatttccgtcttgtccataacccaggtattggtactgatgggatgcacatccctcattttcctgctttccgtttacggggatctggccgggtccctggttaaacgcagcctggccatcaaggattctggttccctgctgccggggataggaggaatttttgatttgattgacagcccttcctttaccgtgccgtttttctggtttctgctggcctgcatcggctgaatgtccccggcacgaacggattccctgtaacccggtatggttttttcttctcttcccattgaggaaatccgcggagaattgatggaggctctgcgggttccttctccgcgcattttgttgaaagctcctaccggctccggcaagtccaccggcgttcctccgatgatggatgacgccggtctgggagaccgtggcctgattgtcgttgtacagccccggcggatggccgctcgcctgctggcgcggcatgtggcccggctgcgcggggtggagctgggaaaagaagtggggtatgcggtgcgttttgaacggtacatttcctcccgcacccgtatcgcgtacgtgacggacggcatgttggagcgctggctgacggaacggccctccctggaaggggtgagcgccgtggtgtttgatgagttccatgaacgcagcctttccggggatttatccctggggcgtgtgctggatctgcgggaagggccgcgccgggatctggccgtggtcgtgatgtccgccacactggagatatcagggctgcgggaatatatgggaggttcctgccgggttctggaagcgcaaggcaggcagtatcccgtggaagtcgtttaccgggctccccgcttggtcagtgacggacgcggcagggtggctcctccccccatatgggagcaggcggcggatgttgtgcgggaggcggtgagggaggatgactgcggggatgtgctggtatttatgccgggcgtgtatgagatacggaaaacggtggagttgctggcaggaaagccgtggatgagcggccgggacgtttttcccctttacgggtctctggcgccggagcagcagaattgcgccgtggagcggggggatatcccccgtgtcattgtttccactaatgtggcggaaacttccctgacgattgagggagtgcgtacggtggttgattccgggctggtccgccggtccggatgggatccgtaccgggggatggatacgctgcatctggtgaagatttccaaggcgtccgccgctcagcgcgcgggccgtgccgggcgcgtggctccggggcgctgtttccggctgtggagtgaggcggaacaggcccggaaggaggattttgacccgcccgaatgtttccgggtggatctggccggagccgttttgaatttggctgcctggggcgtcaccgtaccggaaaatttccgttggctggatgttcctgcccccctggtgatgcagcgggccgtgaatttgttggctgccctgggtgcgacggaagaggatggaagcctgacggatacgggaaaaaggatgaccgcttttcccctgccgccccggctggcccgtctgatggtggccggccaggatgaacagtgtgccgtggagctggccgccgttgcagccctgatgcagggagaaggtgttgcggtaaagggggggctgaacgatcatttgcgcgattctgcggattacacggatttccaggcggagtggcgcgcggtggagaaggctgtggatgccggttttggggcggcggcgtgtacccgctggggcatctcttcccgcggggcgcgggaggcatggatggcataccggcagcttctgtccgtcggcagccggggaaaagcccgggaaacgccgggaccggattttacggcggcgcgccctgccgtagtccgtgcaatgattgagagttttgcggaccatgtgggtgtgcgaaatggcgtggcagccaatacatgccgcatggccggcggggtgggcggcaggctggcggaaggaagcgtggtgtttcaaggagagcatttcgtagccgcagaggtggcggaattgtccggaaaggcggtggaaacccgtgtgggacgctgtacgcttattgcgccggaagatttgcgttccatttggccggagcgtttttcctgcggggaggaagccgtcttcgatgccgctttgcggcgcgtgcgtctgcaccggaagctgatgtatggagatctggtgctggaggatcgtgaccgcggggatgcccctacggagctggccgccccggttttggctgaaaaagtagtggacggaaccctgaagctggtgaaatggaatgatgccgtggaacagtggatacgccgtcttaatggtttgagcgtttggatgccggaactggggctgccccggttttcggaggaggacaagctggtcgccatttctctggtctgtgaaggggccgtgggttataaggacatcaaggaaagggaaattattcccgtgctgagggattggctttccggctggcaggcgaaggcgctggacgattatgccccggtaagcctcacgttgcccaacggccagcacgccaaggtcaggtacggggaggattcctccccggtgatcagtctgacggtgcagcgcctgttcggcgtggcggtttccccacgcattgccaacggggccgtacccgtgattgtggaggtgctggctcccagccagaggccgtggcaggtaacgggatctctggaaagtttttggcggaacggatacgggcaaatgaaaaaggacctggcggggcgttattcccggcaccgttggcccgaccccggggaactggatttccttccccgttcccggtgataaggagaaaggatttttctgtaacaaaacagtagcaaaatcgaccgtttccgtgtaaagaggcggtggtgcagctcgcggatgccctccgcccaccattcacaagagacagttatggactcaatttactggattatcatcacagccctgctgcttctggcggcatttgacttgatcaacggcgtagcgaatgacgccgtcaacttcctcaattccgccatcggttccaaggctgcacccgtgcgggtgatcctgaccgtagcttccatcggcgtgctggtgggggcctgcttctccggaggcatgatggaagtggcccgcaacggcatttttcatccggacatgttcagttatcatgaagtgatgctgcttttcctgggggtaatgatcagcgaagtgattctgctggataccttcaatactttcggattgcctacgtccaccaccgtctccctggtattcggtattttggggtctgccgtagcgacggccctgttcaagatttccaagctccgcttggttcagtccgtgtgggatttcattaatacggacaaggcttttgagattgtcaccagcattcttctttccgtagccatcgcctttacggtaggcaccatcgtcatgtggatttcccgtctggcgttcacgtttaaataccagtcccggttcaaatggttcggctgtttctggtgcggcattgccatgacggcgatagcctattttgccgttttcaagggcttgaaagagtctaccctgatggagccctcgttcatccaatacattgaccagaatctgggcatggctctgctcacggccttcggcggtttttccgtgctcatgttcctgcttcagcatttgttcatgacgaatattctgcgcctgaccgttctggcgggcactttttccctggccctggcttttgcgggcaacgacctggtgaatttcatcggcgttttcatgggtggtctggattccttccagtacgccagcagcgtggcggcggccggtggctctccctcatccatcacctccatggagtgtctgatgccggggcagggcatgccggtaaaccattatattttgttcgccgcgggctgcatgatgatttttgccttgtggttctccaaaaaggcaaaaacggtgatcgccaccggcgtggaactttccaggcagggtgaaggcggtattgagcgtttcggctccgtcccccccgcccgcgccatcgttcgcagcgccatcgccctgggacgcggggtgaaaaggcttattcccgcccgcatgctggtgcgcatgaaccaccagtgggatcccgccccccagcccttgaatcccaaggaccgggtggcatttgacctgattcgcgccacggtgaacctgacggttgcttccctgttgattgcatgggctactggcaggcagctccctctttccaccacgtacgtgacgttcatggtggcgatgggctcctccctggcggacaaggcatggggaagggagagtgcggtttaccgtgtaaccggcgtgctgacggtgatttccggctggttcatgaccgggctggctgcctttacgctggccgccgtcatggctaccatcctgcattacggacaggtgtacgccatcttcggtctgctggccctggtggttgtcattctggtaaagtccaccatcatgcaccgcaagcgggaaagcaagctttccgtagagcgttttgaccagattacggaagaaaatatcctggatgtatgcagccaccagattgtggacagcacgctcaagctgcgggaaatttacaatgacaccgtggaaaactttttccagggggacaggaaggccctgaaagaactggcggatgccgcagaacggctggccatgaccagcagcgaacatcacaagtacgatattctccctattctgtacaagatgcagtcccgttccctggatatgggctaccactttgtgcaggccctggagcatctgaatgaagctacgcagagcctgtcgcagttttccgagtccatcttcacgtatgtggataataaccacacgccgtttacgattgaccaggtggacgatttgaaggaggtgcataccgccctcatcaagctgctggatgaatattgcaaaatgctccagacggggacgtacattcagttcgactatacgatggtggcccaggaacagcttcttcaactggtggcaaaggccaccaagcgccagatcaagcgggcccagcgcaaccagacgcgcacccgttcctccctgctttatctgaacatgcttaatgaaatgaggtttatggccgtgcaggtgcgggccctgaccaatgacgaacgaaactttgtagcagcctgaagcggcggttctctgtttttttcacgtaaggaaaaaaattcttgagcgtttaattcgtgaaggtatcctgaatgaacagggatgttcgataagggaggaacgagagcttcccttgtcaccaggaataaccctgatttcataggtagttagttggagcggctacgggagaaattccgtagccgcttttttgtcttcccgggccttgtgtcatacaaaagaaataatgtttgaacatatttgccgtgcgtttgtctcacccataacggttatgatccggatgcagtgaaagagagagcgcttcatccacttaaggactcaaccgtcttcataggtagttagttgaacagcagccccggcgaagggattcgccggggtttgttcatttccggaagatgtattccgcgctataaacagctggaagggaggggaaaagaaaaaataggctgcgttttgccacggggtttgattgacgtgtgggatgcgtcagggcatagtggcagggtatgaagagagcgttttgcgtgatagccggtgcatgcagcctgcttggatgggctccagcggacgagacgggcatgaacaatgtgctggaggattggcggatgaggcagtccgactgggaatccgcattgaaaacggctgaaagcggggaaaaaagggcggaattgatgaaaaaccgtccagatgccgttccggtggctcgggaattatggaggctggtagggcgcgaccttcagaaacccgagactcaaaaatcctgccttcttccggctgtcgtctggtttctggatcatccccaggctgtagcgcaggcgttccccaatggagacatggccaggaaaattgtcgtgttctgcctggattccctggaaaatacgctgttccgggaacagggggcgggaaaggcggcgtatgccctgagcaattcccgagacctgcgctgccgcgttattctggaacagatcaaggattacaaccagtttcctgaggaccagggcctggcttccctgggcctggccatggtgatgaaggaaacgacagggatgcttcaggatgacgtcaggctggtggcggcccgcggaaaattgctgaaagacgccattatcaaatgctatgattccagtttcggccctattccggttcaaaatattgtgaaggaggaactgtatgaaatacgcaatctcaatatcgggcagaccgggcctgaaatcagccttccctctaccgcggcggccggaaaagtgacgctccccttcgggaataagcccgtgctggtggttttttgggatccgcaggatatgcgttccgttcagtttttgcaaaaagccgcgtctctccggaaagaatttcccggtttgacggtgatgccggtggctcccggaaagagagagaacgtagaaaaggccctgttgaacttgaaaatggatatgccctccctggtggatgaaaaagcggcggcgtttaaggattaccgggtgaggctcaccccgcgggtgtatctgctggaccctgcggggaaaatcctgatgcgcggcacgccggatatgctgtttgacgccaacctgtacgcggtcatgggcaaacttgagggaaaaaagaaagaaaagccggatgggaaaaagtctccctcctcccctgcttcctccaagcctgtttctccgccggccaggattaattccccggatacgcgcgttccctctgtttcccggcctgataggctgcggcccgcgttcccttccgccccctccggtgcggaggaccattctctttccgctcctcctttgaggcccatgcctgaatgatccgtttcatggaggggattctgttgagaaaggccgcggaggacgtggcccgggttttttccgaagcaggacacaccgtatattttgtgggcggctgtgttcgggacagattgctgggatattccgtgaaggatatcgatattgccacctccgcccgcccggatgaagtgttgcgcctgtttccggatgcctgggaagtgggcgccgccttcggcgtggtgctggtacgccgcgaaggtttttcctttgaggtggcgaccttccgcagagacggaagctacagggatggccggaggccggaggccgtctgtttcacggatgcggaagaagatgcccgacggcgtgattttaccatgaacggcctctttgaagatccgttttcttcgcctccgggccgtgtggtggattatgtaggcggagtggaggatatccgggcccgcgtattgaggtgcatcggggagccggaccgtcgttttgaagaagattccctgcggctgatgcgcgccgtacgttttgccgttaccagggaagttcaggtggagaaggagacgtgctcctccattttcaggaacgctccgctgctggcccggatttccccggaacgcatccgggaggaactggacaggattttattgtctcccggaaggaaacggggtgtggaaatgctggtggaaacggggttgatgaagcatgtcattccggaaatatacgatatgataggctgtacgcaacctccccaatggcatccggaaggagacgtatacacccatacgctgatgatgctggatgcgctgggaagggacggctcccccgtgtctttggagctggccctgggggttctgctgcatgacatcgggaaacccccctgccgtcaggtggatgagacggggcgcatccgtttttccggtcatgacaaggaaggctcttccatggccagggtcattttaagaaggctgaaatattccaatgccgtggtggatgcggtgtgttccatggtggagcgccatatgcgcttcatcaacgtgaggcagatgaggaaatctacgctgcgaatgttcatgaatgctcctcatttccgggatgaactggaactccaccgcctggattgcctttcctccaacggactgatggacaactggcaatttgtcagggacttcatggattcctaccggaatgcccctctggttcctcctcctctggtgaccgggcgtgatctggtgaatctggggctgtccccggggcctgatttcgggaaatggctgtcccgtctgcaggaacttcagttggagggaacgctccggaccagggaggaagccctgctgcagctgggacaaattgccccggtggaacagaatgcgcttgcagaatacctgaaaaagttagcattataagcgtcaaaatttgattatttcaactcatgcgtcctgtcatttatcaactatttgttcgtcatttttccaatatggagacccatggagttgactgggggagccgggaaacgaacgggtgcggaacttttaacggagtgacggataaagccttacgtgaaatagcacggatggggttcacacacatctggctgaccggggtgctgaggcacgctacgcagacggcccatcccgggctggccgcccagccgaaatccatcgtaaaaggcctggcaggaagtccctatgccgtggtggattattttgacgtggatccggatctggcctcctccccggagaagagaatggatgagttcaaggctctggtaaagcgttgccggacggtggggctgctgccgatgatggattttattcccaaccatgtttcccgagcctacctggcggactgggacgggcatgacgattttggagaaggggatgatccccatacgtttttttctccggagcaggggtacttttacctgacctccaacagccctggggacggtccacccctgcgtctgccggacggcctgtttgaaggggaaatgacgttcggacgtgtgacgggcaacaatgccgttacatggaatcccggcaaatacgactggtatgaaacggtcaagctcaactacggctataactttatggccggtcttcctgccctccgcctgttgccggggtggaccagccccaagcagcatgtgcccaagacatggcgcatcatggacgatatcctttccttctggcaaagcctgggtatcggcggtttcaggtgcgacatggcccaaatgatccccatggctttctggaaatgggctatttcccgttcccgggtgcgtctgccggacgtgtttttcatggcggaggcatacaacgaccacatgaaaaccacacccggcgatccgtgcgccgcccttctggatgccggatttaatgccgtttacgattccgactgctatcatctggcgctccatatgtacacggaaaataactgggccaatgacttcgaccggcttttccgaagcaatcccatatacatgacccacggcgtccgctacgtggaaaaccatgatgaaactcgcgtgtgctcccctctttcctggggcggcgtggggcgcgttgttctgccggcggtcatgacgctggtgtatgcctccgggagcggtcccgtgctggtgtacaacgggcaggaagtgggggaacgggcggagggacccggcggtttcggcggacatgacggacgtaccagtatttttgactatacctgcctcccccggctccagccctgggtggcggatggcctgtttgactcttccctgctgccggaagagtccgcagaactgagaaattttcatcggaagcttcttcctctgatgcagcatccggcgctggaccggggagatttttacggcctgaactgggctaatatgaaaaacaccactttcggcagggaaccggcggaagacacttccggccactgggtatatgccatgctccggcatgatgcccgcgccagggccaccgtgcttgtggtggggaacctttctccaagtatcaatttctacaacctacgcatttccattccccagcacgctttcggctggtgcggcatccagacggatcgggtacgcgtcagaaacctgatggacgccgaggatgaggagaggatttttgagcggcgggaattgatggactgcggtctgtcccatcccctgaaaccgggacatgtgggcgtgctggaactgtctgccgtttaaagaaacgttccctccggagggaagctgcagcttttgccgatattttttactctgctgggcgtttttatgatgacgggcggtttttaattcggtatagtcccggaaattcctatgactagacgtttccctcactccatgtctgccattcagcaaattgccatggcgcttgccgttgccggtattggagccggccaggggctggcccaggagggggcaggggccgcacgccgggcagcagcccggatggaagagcaggctcaggcttccatgctgctgttggggcaggcgcgtcagcaatattccgagggcaagtaccaggaagctctggacaattaccgcagaagcctgactgcgctgcccaaatcccccaacatggagaagcgccgccgtttcctggaaaccagcatcgcggatgccagcgtggccgtggcccaggaatatatcaaggcggggcgttatgatgaggccgtcaagttgctggaagatgccctgaaatccactccggaccatgccctggccaggcgcacgttggaaatagcccgcgacccggtgcgtacgaatccggcattgtctccggaacacgtaaaaaatgtagaggaagtcagccgtctgcttcacctggctttcggctattatgaactgggccagtatgatgcggccctgaaggaatttacgtccgtccttaagacggacccttacaatacggcggcgcggcgcggcatggaactggttaaccgcgccagaaccgcctattttagcgctgccagggatgaaacccgcagcagtgccctggcggatgtttccagacagtgggagatgcccgttcctttgacggaaacaccggaagaacccgcttcattttcccgtcccctggataacccggtggtgaatgtggaccagaaactgggcatgatccgtctgccccgtgtgcagctggatggagcgacggtgcaggaagccgtggactatctgcgcagccaggccaggacgcatgatgccacggccatgactgcggcggaacgcggcgtgaatatttccgtggatcccggtcctgcagacagcgtttccgccagggacgccgccgccaagagaattacgcttaatcttcagaatgtacctcttcgtgaggccctggaatacgtggcgcgcgcatccggccttattctgcggacaaatgcctttggtgcggaactggtatccagttcagacggaacttcctacatggtcaccaagtccattacccttccgccgggcttcttttccggattgtcggaggactccagcgccgaaaattcagaccccttcagttccggtgattccggttcttccggcatgaccctgaaacgggtggatccgcaaaaggcgctggcttccatgggggtgaaattcccggaaggcagtttcattaaatacaactcgggcaactccactcttcttttccatggcacgcccagagatttgagcatgctggaggagctggtagcggccaggactgcggaacagcccctccaggtggtggtcagcgcgacctttctggaagtcaatcagacggacttggaggaattgggctttaactggatcgtcaatctgaacctggaccctaccaagtggttcatgggcggcgcgggaaccgataaaaatgactataacaattccgtgctggacagcgccgccaatgtggccggggccgtcgctcccgcaggagtggtgggcggcctgcgttccggcaaccaggtttttacggaagatagcattgacagcatgatagaacgcggcacttccgccagaagttctgatgcgacctatgttcccggcggtgctcccagcatcgtcactctgcgcggcatgtggagtcacgcggatatcacgatgattatgcgcggcctgagccagaaaaaaggcacagacattatgcagcatccttccgtgattgtgcgccccggtgaaaaagccacctttttcagcggcagggaactgatttaccctacggaatatgatccgcctgaagttcccaacagcacgggcaataataatgactggggcgacaatgacaataacggcggcggtattccggtcatgcccatgactcccgcccatcccactgcctttgaaaccaggcagcttggcacgatcttcaatgtggaagtgaccggcatcagcgatgacaaatccatcgtggaaatgaccgtagtgccggaaatcgtggattttgacggtttcatcaattacggtacgtcgcttttcgttcccatggtctcccaggaaaaggacgcaaaggaagatgtcgtcatggtgaaaacttcagacaacttcatccttcagcccgtgttttccacgcggcgcctgaccgctccggtgcgcatagccaccggcaatacgctcgtcatcggcgccttgaaaaaatccacttccattacgtatgaggataaaattcccgttctgggggatattccctgggtggggcgccttttccgttccaaggggtccaaggaacagcgcaaggccatcatcatcatggtaaaggcggaagtggtggatccgggcggcaaaaagctttatacgccggatacttccattccggacgaggaggtcccggcaggggacgcttctctccccgccctcagcaatgcccagtaacctttaaccggatcaagaccattgaaaaacagcggttccgattttgagtcttctccttcccagggggctgataatatcatgcgtcagctgcatgcgtcggattcccacggagtagaacggagaagggaagtagtagtgcgcccggacggcagcaaggtgatccgggtggaaaagcgccggcggacttacagtgacgaccagcgggacgccaaacaggccatgttgaaaaacaagcgttttttaataggcctttgcattctggttctgctggctgccggtgcgctggcggggacgtatatgtaccgccttacttctttcaatacggaggaatttgccggccgtctgcaagctgatctttccgccgcctggggcggagatgtgaaaatttccggaatggcggtggatggccttaccatgaaggcttcacgcatcagggtatcctttccggaagattcctgcctgtcctttgtggcgatggaaggcatctccggggaaatttccgccgtgcccttattcatggggaaaatcaagggggaaagccttaatgtgtccagggcggtagttggtttgcggcccggattcgttaaatttgccgtaccgcagacgaaacgggaattgccgttcgttttccggcgatacacagcgccgcgtctggaagtggggtatgcccatgggacggaagaatttactctggagaggaatggcgctcccttttatatgacggcggaagcctacatccgcacgtccgggaacggacctgaaccggaatacgtgctggatctgtcacagcaaaaattgaaaatcaagggctggccgctgatgggggttgattccggttccgtcattctaaacgggagcggcgtcaagcagctcactttttccggttttctggacaaagggcgcctgctcaataagcctacggatctcagccccttcatgattacggggaattttcttctgggtacggatttccgtcaccaggcgtggactttgacaggaaaaaatttcgatctcgcttccctgctgggagatgatttctcttcccttctcaaggtgcagacgggagaacaggaaggggatgaaaagcatgaattgaagctggattttgctttgcctgtaacaactgaacagaagaggccctccctaaaaggatacagcggttccgttatcaaggcgaccatgatcaggctgcctgttttgcgcctgctggcggccatgactgcccggaatacggaaataaggctgccgtactcttctcccgtctttacgtccggttctttcctgctggaaagcgatggaacgggccgttccgcctccctgaaggaaatttccctgtttgaacagagctttctgggagtgaccgggggggtgtacagcaacggtacttccttgacggggaagctggtttttaaaattccttcctacatggtggacagccggaaactgccttccggcgtgacgcaggaagggcatgaaattattcttcctgtgaaaatttccggtactccggagtctccacaggacaactctgccggaatgttccaggaagaggcgccgcgcacgggccgcccggaaatgcataccgctccttcccgtggaatagctcttccagctccgtcaaattcctctcctccccgtattacggtagacggattcatgtgatattgccaagactccatgctgctgctcaatcctattattcggaaaacatctgaaaagcgttcccgctggtggaccaggctggccggatttggcctgtggtccgtactccagcccatttgcatgagcctgaatatccgttccatcaaggaggagcatgatgatgtttatacggcgccttttctggtagccctttggcacaaccgcacgatggttccgggttatgcgtggtccctggcccagaagccgctcaagatgagtgtgcttaccagcgccagcaaggacggcgccctggtggaggccgtatgcaggcattttggcctgggtgccgtccggggatcttccggacggcggggggctctggcctacatggaaatgatgcgaaaggtccaggagggggacgtctgcttctgttttactccggatggtccgcgaggccctatttacgaagtgcaccacggtattgtcaaactggcctcccagtcagggctgcccatcgttcccgtatgcatcgaatatgaaagctgctggcgtttgaacaagacctgggaccgctatgccattcccaaaccgtgttccaacgtaaatattctatggaaaaagcgcctgttcattcctccggacgcgacggatgaacaggtggcggattatgcccgtcttctggccgggctgcttggcgaggggcttccggacttcccgcctcttaaccaatcattattatgcaaatcatcgatggaaaacaagtagcttcccaggtgctggaagaggttgaaagggatattgcccggctcagggaacagggaataacgcccggtttggccgtggttctggtaggggaagatcccgcttcccaggtatatgtaaattccaaggtgaaaaagtgtgcggagctgggaatgaattcccgtaaaatagttctcccttccgacgcctcccaggaagaactgctccggattgtccgtgaattgaacgtggatcctgccgtccacggcatactggtgcaaagcccgcctcctccccatatcgacgaggcggccgtggtcctggaaatagaccccgccaaggatgtggacggcttccatccggagaatgtcgccaagctggtgctggaagatgagaccggttttgtgccctgtacccctctgggctgtatgaggctgttaaaggccgccggcattgaaacggcgggagcgaatgccgtggtcattggccgcagcatgattgtgggcaaaccgatggcgcatcttttgatgtccaaacaggcaaacgctaccgtaaccgtggctcattcccgtacgaaaaacctgccggaactttgccgttccgctgatatcatcgtggcagccataggccggcccgcttttgtgacggctgattttgtgaaagacggcgccgtagtggtggatgtgggcatcaaccgcgtggaagatgcctccgccaagcgcggctaccggattgtgggggacgtagcctatgacgaggtggctcccaagtgccgggccattactcccgtgcccggcggcgtggggccgatgactatcgccatgttgatggctaatacggtcaaagcgtgccgccagcagacgggagcctgacgaaaatgccgtgacgtccgtttttcttgtcaaatgaaggaaagtagggcagtattcagttaccattatgtcaagtaaattactcgaaggcaaagttggtgtcgtagtcggcgtagcgaacaagcgcagcatcgcgttcgcaattgccaaggcgtggcatgaagcgggcgcaaagctcatcttcaattatcagggagaacgtctcaaggacggagttctcaagctgatccatgagaacttcggcgaggatgttcccgtttatgatctggatgtcagcagtgatgaatctgttaacgctttctttgaaagggtccgccagcatacggataaagtagattgtctgctgcattccgtggcttttgccccgaaggaggctcttggcggcagtttcctggaaacgggccgcgaggcgttcaagatttccctggatatctccgcttattccctggtagctctttcccgcgccgtggaacccatgatgtccgacaacggcagcattttggcgatgtcctatctgggatccgaaaaagtggttcctaactacaatctgatgggagtttccaaagctgccctggaagcctgcacccgttatctggcttatgatttgggccgttcccgcggtatccgtgtcaattgcatcagtgcaggtcccatgcagacgcttgctgctcgcggtgtttccggttttaacaccatgttcaaggtgtatgaggagcatgcccctctgggccgttcctgcacgggtgaggaattgggggccaccggcgttttcctggccagtgacggcgcagccgcaatcaccgggcaggtgatttacgtggacggcggttatcagatcatgggaatgtaatgcgttccttgcggaagctttcttcctgttcacaagccgtaccggtttttccggtacggcttgtttacggtttcatggagaaggtaaggggggctgggggcttcctggcttctgtcggaaaggcctgttcccccgctgcgtttcaggggacgaacactttcagcgagccggggcgggtgatgcggaccggagcgtttcctgcataatcgccgtccagttcgcaggaggcctgttcggcggaggtgacggtcccccccgtcatccggatgtattcaaaactgccgctcctccgggaatgaaagcccccttggactgcggccatcaggaattccccgatgatggaagtaatggaatgcctgaatactactgcgtccagaaggccgtcactgttgtccgcttcagcaaagaagttaagcggcccgccatacttgcgtccattgccgaagatgatggaacggccttccaatacccggccttcatctgtggtcagggtgaggtgcggctgtttttccgtacagacgcgggcgccggcaattacataggcaagggctttccatttttttttcatttcccatgtggtcagttctacggctcgggcatccgcgccaatgcccgccatttggagaaaaacttgcccgttgaatgcgaacaggtccacatttttggaacgccccgtgttcagaatgtgcagggcgtggtcgaaatccgggcggattcctatttcccgtgaaaaaacattcatggtacccgcagggaagggggccagcaccgtttccgtattgcagagagcccttgccgcgattcccagcgtgccgtccccgcctgccacagcaacggcaggcgctccggaattagcctgagaaaccaaatggttcaacatgtcttccctgctttccggttcaatgacgtcaaaaaaatcccggtgccgatccagccagcggcggaatcgtccggctctggcgctgcgcgccgtgttattgaaaaacaggggaattttcatggagcggacacgaagaagttcaaaatctgaaccggggcttccgtgtgtgccacaggttcatggcgcacggttccgtcaggcagcttgaactccagcatgccgcgggaaatattgtccggcaggagtacctcaagaaacttcctcatgtcgtcggacggtccgggtgtaatgccttccgccagaactttcccttcttccgatttgaggacgacgtgcaaaggaagccttctggcaccgttttttctctcttccctgatgtccagcatcagccggctgccgggcacatattccggttgggccgccacccattcattcgccagtttcatgtagcggtccgtgatattgacggctgggacggtacggctttccggagggaaagccagcgcgtgccgtttgttgtcgtagcgggcttcccatattataggaaaaaaggctcctgaaggttcttttttccaggaggtggcataaatggcgttctccggtttgcggggatccagcatgctgatggcggacatcacccacggggtgttgaagtccttttcattgtattccagcattttccattctccgtcacaccaggcttccacccagttgtggttgccgcgcacgtggttccaggtaagaacgcccgccatgcgggccggaatgcccacggagcgaagagcgcagattagcaggatgctttggcccgtacaggagaccttgccggattgcagggattccttgactccctggtggggaactcttctctccgtggaatagcgtacattcagggttttctggatccgggaggcgatggcgagggcggcttcccgccccgtcttgcatggggaaacaagcggtgcgaagaggtgatggaactgctccctccattcgtcgcgcggttcgttgaccacggcataagggagaacattattttcataaagttcccacggaacctgggcagcccaggggaattggctccgtgcagccagggcgaggcggacttcccggaccagcctttcttgcgtaaccgtccccctgtcctgcgcgggcatgtgggcacgcagaaactccaccccgtcctgaatggcgtcatgggcggcgcaaatagcggcggtcaggcccgggagaagggcgaaaggcagcagattcatgaacgttgaaattcatacctgaattccgggagggagacaagcttcctcttgcgcaagaagggtatggaaatgggcaaagagatgcgtgtcttccggcggagtgggggcaaagggtgcgtcgttatccagaatatcctcgcaaatgcgcatgaaatcgcgggcggttttcgcccttttcatgtaatggtcaaaagtgtcgggaagtccccgcgcggtataaaccaggtattttttcatgcggtggatgtgtttttcctccacataatgttcctgcatttcccgcgtgcgttcataaaggcggcgaatatagtgcagcacgttccggaaggtaaggtctgctgcaggatggccctgaaagcgggaatgaagctgtgaaaatatccagggattgcgcagggctgcccgcccaatcatcagcccagctggccgggccagccgcacccatgcctctgctgtggctgcatccacaatatttccgttggcgactactgggcatttcagcattcctgcggcccatttcacccattccgggtgtaccggggagcggtagccctcacggacggtgcgggcgtggatgcacaccctgtccggggaatgggaggcaattaccggaagaatccgttcaaactcgtccggcgtttcgtatcccagacggcatttgacggtgaaggctccggggggcaatacgtcccggagcgctcccagggccgcgtccatggccttcagggaccgcagcatgcctccgcccgcatttctccggcatacgatgggagcggggcagcccatgttcagatccacgcctgcacaggcgtgttccatcaggacctgcgcatcccttgccaggtattccggttcatggcccacgagctgtccgtaaatggggcggcctgtaggattttcatcaatggagcgcagaatgtatggcgacatctttttatgatgggccaccgtccggaaatactccgtgatgaaataatccggcagggaattcaagtccttcaatgtgttgaggaaagccagatccgtcacatctttcatgggggccagggccaggagcatgggtctgtgcataccgtgaaaagctccggttggcaagctgtgattgtcttgacgaaagaaggaaagtgtggaagctgggagcatgaatcaggactcaacccgcaaagccagagtgaatgtgagacgggccgaagtaatggagcaggtggaaaaggaaatccagcagcattaccagagtgaattgatttcccacatccgttctgcgggcaatgtgtacaatctgggccatacggaattttttctcgcccgggagttcgggttctgcaacggcgtgcgccgtgctattgatatagcatatgcggcacgcagagtgtttcctgaccggcggatttttctgattggggacattattcacaatccggaagtgaaccggcagctggaggaaatgggcattcgaaaacttccctggaagcagttggattcctcctatgaccgggttgctccggacgatgtggtgattattcccgcgttcggtgttcccactcctttcatggatgcgctggaggagaagggcgtgcagattgtggatacgacatgcggagacgtgatgaaggtctggaaaagagtgaagaattacgccgccatggggattacctccattatccacggtaaggctacccatgaggaaaccagcgctacggcttcccgggctcttggggaacggggaagggggaaatacctggtggtttacgatttggaggatgcccgtatcctgtgcgactacatcatgggccgcggagaccgcgaggcattcctgaaacggtttgaaggatgctgttccccgggattcgatcccgaccgggatctggaggaggttggcatcgccaaccagaccaccatgttgaaaacggagacgcagacgctccagaagatggtgaaggatgccattgttcagagggacggggacgatgataatttttatgtgtttgacaccatttgcggtgctacccaggatcgccaggatgccctgtatgaactgctgaaaaatcctctggacgtcatgtttgtggtgggtggctacaacagttccaacacaacgcatctggtggatattgccagggagcatgtgcccacgtacttcattgagtccgcagaatgcatcaagtccatccagtatgtggatgcttttgatacgaagacgcgggaagtgcgccgcatgactacggaaccggtagtgcagaacctgggcaaatccctgaaggtgggaattacggcgggcgcctcatgcccggccaacctgattgaggccaccatcctccgcattgcggatctgcgcaagtagcaaaacgcctccggtttggcgaatgagaaaaaagaagagttctctttcaacggcggcacggccgttttttccgtaacacggcgcagttgcctgggccgcggaagaaagcatagggaaaactgcgcgggagcgtttcctaaatttccaaatcttccggtgtaacggaacgttgttcccgggatgcaagcagtacggcttgttccacgacatattccgtattggagtcaaaacggtaggcgttgcagttgggacacactgccgtagtcagggatacgatggaaccgcaggcttcgcaaaccttgaagtccccgggacggtcaataatcagtttggctttatccaggcgggattgctgcatgggagtagaaaataaaacaagccgctcagcagaacagagcggcttgccataaagaatcgtcagaaaaccgaagtgaaaactcaggcgatttttgcgatggccttggcggccttgctcttgtagttggctgcacgattggcggggatggtgccaaccttggcggctttgtcaacggctgaggagaaagtgttgtaggcagcagcagcggcttccttgtcggacgtttccaccgcagcggcaactttcttgcggagggtcttcaacttggaggtcacggcgcggttgcgggcggtgcgggttgctgtctggcggatgcgcttgagtgcggatttggtattggccatgtttaaaaaaggttcggtttccgtttcgaggtggcaaaaacattagaataacaggacaaaatgtcaagctcttgatgtattttttaaggcattcctttcctgcacgggctgactgtgggctttaccggaaaaggagtttgtggcactatattctcccgttatgaagaaacgcgtggatttgcctgaaaaaaaatatgaaggatatatttttgatttggacggcaccctggtggacagtatgccgctccattacagggcatggcgtgaagccctggctcgagcgggggctccggaccatgtgttccgggcggatgaattttattcctgcggcggaaaatccgccaatgatgtggtgcgttttttaaatgaacggtacggcatgcacatggatgcggcgtccacagctgcggacaagcgccgcatttatttggaaatgctggaaaaggaaggcatgcagcctatccgggaagtggtggaattcgtgcattccctgggagacgcccccaaggcgatagctaccgggagcgccatgccgggagcgtcccggactctggctgccgccggactttcaggcctttttgatgtgattttgacgccggatgaggtggagcatggcaaacctgctccggacatgtttttgaaggcggcggaactcctgggggcatccccggaccgttgcgtggtttttgaggatgccgaacccggcatgaaagctgccgcggccgcaggaatggactgcgtacaggtccggcggccatccctggcctgattcctctttccggatttggtagggaaggggattccgggattttcctcctttctccatgcccttcttccttttaaggaaaaggcttcacattgcgcccggaatgcgttagaaccttttttcctattgaacaaataaaatattatttgcacatgagcacaaacgacaaaacatcatccgccccgacgaaaacccgcatgacaggagctgaagtgctcgtggaatgcctcgtgcgtgaaggtgtagacgtcgtctttgcctatcctggcggcgccagcatgccgattcatcaggccctgagccatcagcccaagatacggaccatcctgccccgccatgaacagggcggggcattcggcgcggaaggctatggccgcgttacgggcaaggtgggcgtttgcatttccacttccggccccggcgccaccaacatgattacctccattgcggatgcttatctggactccacgcctctggtggcgattacggctcaggtcatgcgctccttgattggacgcggcgccttccaggaaacggacgtattcggcatgaccgcccctatcgtgaagcacagctatctggtgacggaaccggaagaactgccccgtatcatcaaggaagccttctacatcgcctctacgggccgtccgggtcctgtgctgattgacatgcccaaggacgtgcaggaggccgtgtttacaccggactttgacatggagatggatattcccggctacaaccccgtgctgcccgtccctgcggataagctggaagaactcatcccgttgattgaaaacgccaggcggcctgtcatttacgccggcggcggcatcatttctgcggaagcttccggggatcttctggaatttgcggaacgttcccagattcctgtggcgaccaccctgatgggcattggcgccatgccggaaacccaccctctttccctgcgctggctgggcatgcacggagccgtgtttgcgaataacgccgtgaatgaagcggatctggttattgccctgggcgcccggtttgacgaccgcgtgacaggcgccgtcaatatgttctgtccggaatccacgatcgttcacattgacattgacgccagtgagatcaataaaaacaagaaggtggcgtatcccatccgcgcaaacgtgaaggacgccctccaggtgctcaactccgttctggccgcaaaaggctgggagcgcaaatcctccggctacacccgcactcctgaatggttcggcgtgattgacggctggaaaaaacagtaccccttctcctatgaggaccgcaaggggtatatcgccccgcaggctgtcattgaggagctctaccgccagacggcggacaaggaccccatcatctgcacgggggtgggccagcatcagatgtttgccgctcaattcttcaaatttgacaagccccgccgtctggccacttccggcggtttgggaaccatgggctatggacttcccgcctccatgggagcgtgcctggcttatccggacagactggtcgtgaatattgacggggacggttccatgctcatgaatattcaggagctggcaaccattcatgtggagcgtctgcccgtcaaatgcattatcctgaacaaccagcacctgggcatggtggtccaatgggaagacttgaagtatgattccaaccgggcccagaccttcctggcggacccgcacgacaattatgatcctacccataaaacggaagatgtcatctacccgaactatccgcttatttgtgccggattcggcgtcaagtgcgagcgtgtgcttcgcatagaggagcttccggcggctatcacccggatgattgaatcccctgaggcctatgtcctggacgtcatggttccccatgatgtgcatgtgctgccgatgattctggggggcatgagctacaaggatgtgattctggaacgtattgccggggatggttccgccaaaaaggcgtctgaactgggcaaggaaatcccgactgccctgtaagagcgaggcaagcttcttctattgagccttaaacaggagccgtccgtaagggcggctcctgttgcatggcggcgcaagtggaatgcaggtcagttgactgccattagggtggcagcaaggcatgtatatagatccggatattcctgtttcccggtaggtgaattcctggttttgtgaaggaatgaggaagatgtttctggacgcagtaaaaaagaacggttagcatcaatgagccaaattgagtgcaagctggctcggatgtgaagtaactgaggttttctaagatgatgccacatcggatgctgcgcttgcgccaacctcaagctcacagaaaatttccgggaatccggcgcatgctgtaagcgattgagaaatgtagcttgacagaaaaattccctttgatcaggcctgaccgcatctggttcttgcatcaggttggcgcaagacctttgttgcatgtttgatactcaaaccgtattcgtcaggccgtcgcacccacacgggtgcgtgaattgaaactccaagagccgttaaccgtggaagacgttgacgggtcgcacccacacgggtgcgtgaattgaaactggtggtagcctccgagatagagcagccgccaggtcgcacccacacgggtgcgtgaattgaaaccggagattgtcgcgggcttgtctgcagcccatgcgtcgcacccacacgggtgcgtgaattgaaacttcgccgggctcctctactttcttgagttccgcctgtcgcacccacacgggtgcgtgaattgaaaccggttaatgcggtcaaccaaatctggaatacgccggtcgcacccacacgggtgcgtgaattgaaaccggaggaaatcctcacgttgctggaaccgatatggtcgcacccacacgggtgcgtgaattgaaacctatggagctgtccgggatgggtatgggagagtcgtcgcacccacacgggtgcgtgaattgaaacagcgtaaagttttttatctgtctctgtaacgcgccaagacatctgatagaactacgacaagtatcttatataacttgtcaaattgactgctccgtgcagggggtctgcataggctctgctgttcccttgcaggcggccagcaggtctccccagtccaccgcctcgtcgtcctccctggccactccctcccggagcatcctctccctggcgtcggccagcaggtgcatcactctggcccgctcgctggcgggttggttggacatgcgggggctgccggtaatcaccacggcaaacctggccgcgtaactctcggcgcttaccgtgcggctgggccagcaccaggccgtccatatactccacggggaacgtttacgccatggctcatcaatgcggcacaatgctgccggaaccctggccaatacctcccgtccaatcgtccaatcttccggggcgcggtcatccaggagactccaatccatctcccgataaagacgtctggctatccagcctctcaatgcgtacaaacacccgaagactctccagtctccattgacaaaatctccggaggtgtacatctggcaccaggggcgctgctccatccagcgcagccagccgccatccagcagagccgtgtcacagtcgaccttgaccaggatgtcgtcatcctccgcctcccggcacatctcggaaagcatgccccggatgcagtcaggcccgcgcaggttgccgtggcgctcccaggaggactgcacatactccgctcccatgctccggagagccaccgccgtctcctcccgtaccgggctggacgcatcgtccaccaccgtcacgctggcacagggcacggccatccgggcgcaccgcacgcaagccaccgcctcagcggcgtctccggaatacgaaaaaataaagattctgatcatactattatctatagggtaaaatttagatggcggggccgtatgggtaaaaagtgccgtgattgagcggaatctggatggtgcccagcatgtgctggtagacctccttgtcctgcaccgtcgcaatgtggaaagaataggaaaactcctccgactcgtccgccaactcgtctgtaagaatgagagggttgaccgtgccctgctcatacatgatcgacgtgccggtcagtttccctttgccgttgaaattgacgtccagccaaatttcaccgcccgtgaatccctccttggtgaaccagccggaggtgtcgtctccgggagtctgtccaatgtacactccctggagcatcagcttgccgcgccgcatccggtagccggttacctcggtgttgtcgtcagaccagtccagctccacctgcaaatcatagacgggaggcttgtcgggagcctccgtccagacaagctcccctgccggtcccagagtcggagcgtccggggacttgtacgcctcgtcgtcatattgcagggtcagcatgggattgtcctgctgctggtcctgatccagagtctcctggccggatgccagctgctgaacccggtccaccatatcctgtagggacagatgcgccggaacgccggtattgatgctggtggacttaccggcgagatcgaccgtcaccccctgtacggaggtagccatctccaggtagtcccggcgcgccccggtaatcgccagacggcgaccaaccaggttggcaggagagagtgcccgcagggagttgacacggccctcccagggcatggcgcgggtgatctcataatattctttcaaaatagaagagtagtcgggccaatccgtggtggaggacggcggcgtgcctccgccgctggatgggggattgctgccgtcatctcctccggagtcgccggacttgctggcccggtagcgcatgcggctcttgttgatggtgcgtccctgccagcgcagccagttgtaccagcgcgtcttgccgtccacctgtttggtgtgcgggaacagcatctcgcaccccctgggaggccgggtgtccgtgtacaggtactgtttcagctccacgtagcaccacttgattgtcttgcaggcctcgctcaactggccgcttacatgctcataggcctgcgccgactccgccgtggaataattgctcatatcggtcccgtccacgccggccactacagattttttgatggtccccagctgcagtcctgaaacggatgacagctgggataccttgctgaaccaccattttctggcgtttgaatccgtaccggacggcaatttgacgccgcggacctcgacaatcggcttggtaaaatcccagacgggagactcgctgccgacgggagcatcatcctccgtcgatgatgtggaagacagcgccacctgggtagtaacgcatccctcctggcgcaggctggcccccttgggccagacctgggaccggcaagcctgccgtccggccgtcaggacgacgcccacggccggaggcaccagatccggccggggagaaagcgagatggcagaaaggcagtcttgcgcccggtccagcgtgactacgggcaacccggccccgtcggccaccctgatcacgggggaggaaccggagtaatcaacccagcacaccatgccgggacggcctgccagcagtttgcggagaactccggcatacatgtcgcagccaagcgccgtgtcccacatccaggcggagggggatacggtcacctcaatgccgacgccggagggaataagcccgtacttgcgggcgtcctccagcgcccaccgcaccgtgccggcaatcttgattttacgcggggcatccgcgccgctgccgccgctgacctcggcataggcggatacgccgcctctcaacgtgcccccaggattgaaacacaaggccgcctccaggggctggagaatatcgcaagcctcaatgttccagcgccaggcgtcgccggactgatccagggagcacttgcggatcgtgccctccaggatggtcacgccatcccataccacgcgcaccggctctttatatagatagggagccgtctcatcctgatctctggccaactgctgccaggtcgccctggcggcggtaaagttgctccactcgtacttggctcccttaatggcccggtttgtcagctctacaactctcatagggggggatgtgatgattaacgaccgaatctggcgcgggactggagggtggctacctcctgctccatttttctcagccgggcgtcgtactgggaggcctgggaagcagactgccgcgcgataaccagaaactgctgcatgacgtccagaatgcgcccgctggtctccccctgtccaaacatctgccgggcaaactcgccgatcatggcgttgtagccctgaccggttgcaggctggggtgcgggctgcggatgaggctgcggagcctgcgcaccggcgcggatccgcgtgcgcacctcatcctcggcatccagatcgcggccctccggggtgacgcgtcggggtctggccggctgcggtctggacatggtcgtcaggatacggcccagctcgccctggaccagttccctgaccagggagacgacgcgctgcccggcggcatcgtccgcgttgatgcgcatgctcaacgcctccagctgcttgacggtggcctcattgaggacgccgtacttggccacgtccttgagaatggccactattttggcggccgctccatctttggtcaggctgggggtgatgtcggccaggctgtccagcttgcccttgaaccggctcgcctccaggtccttgcgctccaggggagtaagcaggttgcgctctccggacgcggctctggaatagcccttgatcatatcatccaccatccacttgaccttggtctgcagctccctgggcaatcccttgagggcctcgtcacgcatccgggccagacgcgcggagtcctgctcggacatatagccggcatcggccatgtgctgcccctcggtcagcaggcgcttgagctgcggagtctcccggtccttatagtcctgaccggcggtaagctggtcgtaatgctcgcgccagcgcttctggacctttttgcgctggctggccagctcggcgaggtctttctggcgacgttcgtcggcggccacggcgctggcctggtcggccttggcggcgacgattgccgcctccttggagttgatttccttctggtactgcaggagctgctgctgggtcgtgacgttggactcgtccagctggagctgagtttctttttctttgagctcgtttattctcgttttgtcttttgtcgattgagcgtctagttctctttttattttccccagtttgacatcaggattatcttgagctgatataatccctttattaactaagtgttgctcaatagctagcaatttatctaaagcatcttcttctttttgtttttgttctcctatgagtttcagttgatcagaatattgagttatcgcgtttccggcagcttgcatgccgtctgcgtctccatgatttttagctgtaatgtatttttgccgagcagtctcaaactgtttttctatgttttctcttcgttgcttttcttgcggatcttctcctctctttacaatggcatcaaggatctgataatcatcgcccgtcatccctgcatgaggtaatttggccgcctgctcctgctcggccttaatcagctggacctgcctggcagtctcgtcgcgggcctggatggcagcctccagcatgatctgctggcggtcctcacgggacttggcagcggatttggcctcggaggcgtccaggtcagccatcagggcggcagccgtttctttgctgatttcccctctgatctcgcgggtcttgacaatggtgcgctgcagctccagctccttctggcggagggcatccacatggtccacctccgccgtgcggttgacggccagctggccgatgagctggatgcgctgggtgtaaaggtcgttgatggccgtgattttgcgctgctcctcgtcgtagatgcgctcgcgtttggcattggtcagcgcgtcagtataggcctgctcgcgcgcggcggcctccctggccagccggtctttaagttcccgcgcccgtttgacggcggccttgtccacgccctcaatgtatttttcccagccgtccaggatggcctgtccccaagctacgccccggccgtaggcagcctccagctcgttggggatgttgaacgtcgcctgtaccttggccttgaggtcgcccagtccagccgctgctttcctggctccccgttccattttgcgcccggcttcctctcctttgcttcctgccttgtccatctcatcgccggtggccctggcctcctgtccaaccttgctgacggcctcctgcacaccctctgcagcatcgctggtcttatccagagcctcggcggactcctcagcggcatccgtcacctcttccagattggaggcggctgcattgtcgtccagctcgtcgttgacctgcttggccgtcctgcggaccttgtccagccccttgttgacctgatccagtccccgcgtgtcggccttggcttccacacctacctgtaccttgtaatccttgtctgccatggtgatatgatagttattagttaaagtttatagatggttaagaaatgtctcccgtcagagtgagggatacctgcagggcggcccaggccttgccctccatgccggggaggcgtatgtcctccggacggcggcccatactcggaccgtccgcgccgagatcgtgatcgctcgtgagaggcaacggctgggcaagatccaccgtagcgtgataggttctggtccggcccggacggccccggaaatagcaggacaaccaggtaacggctccctccgggtgaagggtgagcgtctcctggaggtcgagcccccaggcacgggcgcgtccgaacgtcgtaaatgcccgcaccaccgtaaaagacatctgcagggaggcgttgccccttgacgcctggtgcatccagggactgccgatgacgaactcgcgctggagctggacggagggcttgacctccaccagctccgccatcacgtcgtcgtactggcacagcacgatatcccggaggtcgtccggacggtaaatgaccgtatcaagagacagatagtgcatgattagtaatggaatatgagtgattaacgattggatgccgtcgtgaaaaacctgaaaaacgccacggcggcggattccgtgatcacaaaagccgggtagtcgcgggaagtgaacaccctgcgcccgccctggggattgacggcctcgacatccagcgcaacctcatcccgctgcccggtgggggtatacggatcatcctcattgtagacagtcgccgtcataagatgtgcccacacttggacggcctgccaatcctcacccagctccaccagcgcggtaacgacggcctgcatggccggggcctgctctgctggaatttcggcaggcgtgtaacggaccacgcgggtgtacccgtccgcgtcctgatagacagctgtcagagtgaattcatcccacttgccgggccggggaaactgtatttgtatttctgcattcatattactttcgaaaaataatcagttatcaacatgccaggataaacgcccaatcccaaagctctattcatggaggtgattgtcggagccgtggtgttgttggcgaaaaaggggatcactttttccgcgcaggcataataatcaacagcaatttcccccatgctgtagatggtcacctccctggatgtcacgccaagattggatgagctgtacaccactcctaccgaaatgcgcgcggacgaattattcacttgctcgtaaataagatacaatctgttgatggattgagttcgtccgggcttttcaatgacttgctccccgtcaccagtattgtaataaatggaaaatgtcgtttgcgcccgcgcacggctgtacattttgagatagatataggggggagccacttccgaaacgctttgcgcgtcaatggaagtctgcccaagagcaaatcccatgaaagcattgtgttcccccgcctcgaaattcatgtaggtcccccccatgctcaacaccatagatgacgggggaaatgtcccccaggcaaaattgtacctatcgaacttaataagaggataagacatgaagttattcccggcgggaacctccctgaaaataaccaggtctttgtccatcaagtacggatatgtcactttgctgacattaacagcattggcgaatgcgatgttccgcaaatcgacatatcccgataaatcaaaagcctcggcggcatatcccgcccccagagtcgtcatgctctgcatggttgctataggggacggggaattgatgccgccattggcgttgacggccccggcaaacgtgcctcccgcggcggtgatattgccgggaagcgtcatgttgccggaggcgtccacctgcggaatggccgccagggcgttagccgccgccgtcgcggagttggccgcggcggtggcggatgttgcggcgttatcggcagccgtggacgcggcagcggcggactggccagccgtccgcgccgcagcctcagcggtcgcggaagattggcgcacatcccgtcccaggctatccagttgccgcgcggtggccagctccatccctcccagggtgatgccgtcgtcatagtccaccaccacggtcatcagcggggccatcgtgccgttcacggtgggagggtttaccacttctgtgatcaaaccgcgtccggggacggacggagtaagcacggcgtgcatacccaaggcatagggcgtcatctcggtcccttcgcacacctggatgatgatcttgtccccacgcgtcaagggaacgcccggcgtaaattcccacgtagccgtctggccgctggaaaggttggacacataggcggaggtgccgatcaggctgtaagctccgtccgtcagccgccagacacgcaggcaatattgattagcggccggggtttcaaaaaaatacacggttgaaatgcttttcagacgacagctgtcgggcagatgcccggccagtatctcgtctccccaagtgaatgcgtagcctccgacgatggtccaggtgtcggcggcgtccccgctggacaaggtggattgcccggttgccgcttccaattccactcccgcctctttgagcgcatccggcagctgcgcggccagggcgtcggctaccagttcggaccagtcggccagcacatcttccggagggataacatccgccggcataatgtcctggcgcacggttaccctgatcagggaggaggtgcgctgggaaccatcaccggctatgaggaccacctctccgatcaggtcgatgctcgcggcgctgcccatggcctcgatcaactgggtcgtgttgaccgacaggctcccgacataagccggccccagagcatcatcgaccggctccagattggtggcggccagcaccagggtctcgtctcccagggcggtcttgacggccagcgccggtctgacgccggagggagtcaccggagcgccctcatccagcagcgtgacgcgcaggggaatcttgtcgccgcgcaccagggacaagtcggtggccgggatgccgccggggaacatgacggccatggtggccaggtcaatcagcagttgcataacaggtatcagtgattaggcgttagaggtgtttccccgcggcggtatggacgccgccgcgggggaaagacgggattatgctcccgcgtagtcctcgtcaggggtcagcttgcagagcggattgtagatgacgctgagctcgaattctgccagggacggatcggaggcagccttggccgggttgaccaggcgcaggcggccctgcatgcaggcgctcatgattctggctccgtcgcggtaggcgtccgtccactcggtatagacatagacgtcgatctgcggcgagccggagccaaagaccacctgctccgtgccccagtcctgggcaaggccaaaggagagctgcaggaattccggggtgatgtagttgctggcaaacaggaatttgcgcttggtggtcagctgcagctcctcggtttcgtaagtgccgccgtcgttggcgccctcaatctcgcccgtcttggtctcaatctgaggattgctggtgcgtatcctgcccatatagagccaggggccgggggcttccgctgtcggggggacgggcagccagtccgcggacacggtcttggacggttcgtcgctgccgatgacggctccgaatttggcgatgctgaccttggagccgatgatcaggccggggataataaatctggacatatcagtgattggtgatgggttgatggttggcagttacacgccgacgatgacggccagcccggccgcctccagagacctggcctgggaggctgtcactctggcggtagcgccggcacgtccgtaagcgccattgatgagcgtgcccgttttggtcacgcggactaacaccagcgtctcctcctgggcgggagcctgcggagtcgtgccggtcgtatcggtattgttggttgtattggtcttagccatggttgtgtgttgtaggtgaggatgggaaaaaattaaaaattgacgggagcgtagaggatgacggcccggccccggaagccggtgagcttgctcttggtcatgtcgtagtcctcgacggaggctacggagggagtgtcgtagcagacgcggtcgacaaccggatcccagaggcggacggcatgcagagtccgccccaccatgccggacaggcaacggaggggaggaacgccgcccggcattccggcatcccgcgcaaaacagctcacggccagcacggcgtgcatgcgcaccatcggagcattgacgcccatctctaagagagggacgtagcctgccggagtgacggcgacgctgccgggcctgcccatggccgcgcggttgatggcgtcgatctgctcctgctcgtcccacacggtagggcacaccatcggagccaggacgtcgtcctgctgcaggtgggcgatgagatgctcggcgagtttgtagtctttatccattgtatggtgattagagagttaagagtggagagtggagttgccgtcggcctgggccaggaggcggttgagcaccagcgtggcggcgcgcacggcatcatcgcgcatctgttcgcgggagggcattacctccggatgggccgggatggtggcggacttgaccagggctcccagcggggtgacgtcctggtaatggccgtccctgttgcgacgcttgcgctgcctgacgcgggccaggatggcgttgccggtatcgacgtcgcccagaaccatgacctcctcctccgggaggtggaggctggccagggagcgtcggcgcaggggtgaatccttaaacgggatgagcaggctcctgatgggacggccggtcacctccgacttgcggccggtggggcggacagtgcctcccagccattgcaggcgcacgcctgtgtgggtgatgtcgatggtggccttgttgtcccggatgacgggagggttgacggatcgcttggccttaccccagaatccctgggactgggtgcggtcgatcatggattgaaagctgtccctcaccgcctggcgggcggccctggccacgtcggccaccatctccgcgcggatggcgggagccagagggagccgttggaggccaatcacatcgacgtgtaacctgatcatgagttgacaagggttgagggttggggcataagggggacatgagcggaatggacggcaagatcggcaagcgcgagatggcgctgtggctgcagtacctgcgcgctcccggccgatctggagagcaggattctcccgcaccgcgcaagctgcgatggacagagctgacccagtatcagcgccgggctgttgagcgcggcgagcatgtgccctgctggtgcggtacggaccggccggctaatggtcatggcaacggccgccagaaccggcgcaagtgccgcaagggctgatctgttattacttctcgctgacatagacgtaagtgggtgtgccgtccctcccccggacgatcttgttgacctggtggcgcgcggcctgcaggaacaggacttccgactcattggtgtggggatgtttgtcggtcttgttgacaagacgcctttgctcctggagagtgcgaacgatggtgtcgatgcggtggccggagcggtagtcctcattgaccaggatgacccgctcgttgcccggtttgccgccgcccgcaaaccgctgagccgtctcctccgcgcgcgaccagctatccaccatcttggtgggaagcgcctggtagccgtcgcgcctgatgcgggacaggaacctgtcaacatcattgggggggatcgacatgccgcgatagagcgtgccgctctccttgacgtcggtgggctggatccgggtgaccgcgttgtacagggcgtcccactcttcctgggtggcgtagccctggacgccgcgctgcgcccggtcaaactggcgctggtcctcaacgaatttaaccatcgctctggcctgggtgtccgggatgacgggaggacgctgcccgcagataaccttgcccgcctcgctccaatgcaccggacgggtgccgttggggtcggtgtagtagacgcggtctccttccacctccacgcagtcctccagcgcattgacaaatgcctgctgcaggtcgccgtccatcctggcaatggacgcctccaggctggcgttgagcgactcgccgtcagctccctccagcgtcgcctccggaatcgtgaggccgtggcgtcgagcttcctcgtagtcgaccggatccacccccatgccgctgttaaaatcaaagggagggtaatccagatcaaaccggctgagcttgcgccagatgggcgaggtcagcagcgcgatgtgggagccgtcggtagccacgccctcgtagttgacggcggccgccgcctccctccagcgggcgtcccagtccctgggctggcggctgtagcggatacgcaccaggcgctgggcgggataggccagcgaccccagcatggagtcccggtaggcccgttcccggaccatggcgacgttggtgtccaggatgagacgctggcgggcgtcggagttgaggtcctggatagtaccctccgtgcccggctccggctggtagccggtggcgcgcagcatcgcgcggacctcgcgcagagcgtccgcctcggacaggttgccgtccacaatcccctggcagcggtcgcggaatccctgcacgcgggcatagcatccctccctggccgtccaataggagcgctcccggatgtccggatccacgccgtcccagtccgccgacgacatgccggcagcaggaaccgtgattttggctcgcatgtaatccgagggagagggcattgctgagtgggaaaggctgagttactgttacctcctccgccggggggaaggaaataatccgggcgctccggaaccgtaggcgggacgcggtccctggacataaggacgcttgccgggaggcacgggcatgcggccgtccggaccgatcacccggtgggtgccggcccggaccgcctccagacgctcgcgggcggaagtcgcggccttgtcgcgggactcactgactgccacggcaaaccgcttgagcagccgccaggcaatcatgtccagagcctccggcctgagggtgcgggggatggtgtccctcgtgaggtccatcacattggcggggttggcagcgatagcctcgcgcacggaggccgtcacgtcctggatgatgccgtcaacaacagaaccgtccgtatcggcggccgtgatggcatccagctcggcttggtcgataacctccaggagcatatccgccgtcaaggtgatccagtgattcatggcaggcaacggttaatagtcaggagacggattgctcgtccgggacctccggggcggcatcgtccaggtgcaggatcatctcgacgatggcgtcgcacatgccgatggcctcggccgccttgcgcaggtcgagcatctcgtagggtttggtccgggccaggatgccgctgatcacgcctccggcgatgatggatgtgatgtgctgtctgggcgacaggccgagccgcttggcggtcaggatggcgaggggaggctgctctccggagacgctgtcgtcatggacgttggaggtcagaccatgcaggtcatcgtactcgtgactggtcatgttggggccgggatcgtcccctgcctccccggagtcgctgtcgtcatggatgttggaggtcagaccatgcaggtcatcgtactcgtgactggtcatgttggggctgggatcgtctcctgcctccccggagtcgctgtcgcccatggggcagtcagtggcgggctctacggctggttgattggcgggattggctgcaggctccgatgcggatgcctcggcagcggtgtcctccacggtcggcgtggccttgtcctgatcaggagtggtggtgtccatctcctgggcaggtttgttggtcttggttgatttcttggctgtcatcttgatgaaaaattgagtgttaagagtggagagttgagagggagcatggaggcgggagcatcacaactcccggctctccacactccatcctgcatcaggcgatctgcatgcgcatcatggccgagggagcggcgaacacgaccttgtgatggccgcgcacgcgcagccattccgtggaaatgtcttcatctcgataggtttccaccgtgctgtacatgtcgtcgccggcgaggttgagcgtcttgagcgcggatatgtcgtccagggacggattgtcgtcggcgtaaaacagatagatgttgctgcccacgatattgacgttgtccacttccgcgcctcccgtgcctccgggattgtaggaggcaatggtgcgcatgaccctgaccggcgggatgtcgtcgccctgcaggccgatgagctccagcagcgtctccggcgtgaggaccttgcggcccatctcgcccatcatggtctggacttccgtgttggcctgaatgtccgcccagacgtcgcgcgtggtcaggatgcggttgggatagacgccgttgttgacggcgaatttgttgatgaggctggtcaggatgctgaccacgggcttggtgcggtcgctccatttgttggcctccgtgatgccgtccaccgacgtgatgccggggatgaccgaattcgcgtagtcaaacacctccttattgtgggagatgagcatgcggcgggccagcgcgcgggttttggcctggcgcaggctggtgcggtaaacttccgcgtcaaccgctccgagcagctcgcggtcgtcaatgccgatcttgagggcgtgttcctccagcatcaccgggacgtcctcgccgcggatgtcgatagtgcggggggagtcgtacatgggcctgcgggtgtccgaggcggcaaaagcgtcctggcgcagatagcgcttgtaggtggtcagcaggccgggggccttgacgccgggagccaggaagcgtgccgggtcgtgggtctgggtgccgtaccagccgatgatgtagttggtcagcggcaggttgacggcgtaggttgcggatgtactcatgctatgtagtcgttaagaggtaagagttaatggtcaggaattgtcggaagcggcttccggagtggctgccggcctggcgacgaggatggcgtcatggaggcagcctccctggccgctggtgttgggggctacggatttggccacgacgacctcgccggccgcgccggtggccgccttgacggtagcgtcggcgcaggccaccaggtcggtgccgtcctcgatggtgccgggagtgtcgttgaggcggacctggacaatgcccggatggctcatacggaccagatcgccgccgttgccgtcggctccgtcgcgcccgtcagggttgctgacaacgccgtccgggatatccgaggcggaggtcagcagagacatggttttgccgtcggcggatgccttgaccagcttgccctcgctcttgtcggtgccgatggcgcccgacgcccagagacggcgttctacgggtgtttgcttgataatcattttaattagagttaggtgttgagattggagttacttgcggcgcgcggaggcgaattcctccgctgcccgtgaccaggcgcggtcgtactcgccaggggtgagctggcggccgtgtctgacgatctcggcgtccacggcctggcggcagtgggtcaccaggtcgacgtcggattgcggcaccttgacggccttgccctccggcgtgcggtggatgaccaccccggcgggagtgacgtcgcggtccatgcgccggcctccccggttgctgtgcagctggcgcgtgaggggagccctgctgtgggcctgggtgcctccgttggactctgttgcctgctgcttgaggaggtcaaagtcggtcttgaggtcggtgacgtacttgaggatgtcgtctccggtggccgtgtcgggcaggccgcacaccccggctattttgttgacgaggcccagccagccctcgtcatccgagttgcagctggtttcgtccttttggtcggtgtcgttgttggcgctggtttcgtctttcttttcctcttctgtggtggcaggagggggattgtcgttgttggcgttgatttcttgctgcttcttttcctcatcttcgggggcgggattgccctcggagtgcaggatccgttgtgttgctgtttgtgtactcatggttgtggattggaggatggaggcgctgcggctgtggacgaccacgtcgcccgcggcggattggaggatgatgcccggctgggcctcatggtccgggttgttggtgacggccagaccggacaggcgcgtggggctgtagccgttgtggtagacgcgtttgtagtcggccagcttgtactcggtgctgaatgcccagtacttgccctggttgaggtcgtggtgggcatccttgacccaggagatgtaggcggcctggtagaggcggccgccgacccatccgtagtccagcgccctgcaccagcccagggccgggttgtcgccggtggtgcgcagatgcaggtggtcgttgttgacctggatgccgttgccgccgttgatagccgggtcgtaggcctcgcagatggcctgcagcgccgccttgtcgatgacctcgtccacgtcccagcgcttggcaggcgggatggaggtgtcaggcaccgggacagtgtaggtgccggccggctcaatgaggaaccagcctgattgcgggacctgtccaatggggtatggagcgcaggcgtccgggtcgaattccgggatgccgcgggcgatgtatctgtctcggtagttgctcatgcgtgggatggggctgaatttgcgccgtgcaggggtcgtgcagggccgaatgtggccagagacgggtcaacggccgccgcgcggcgtttcccctcgtcacgggcctcctggaggcgtcgggcaatctggagggcggtggagacgatctcctcctctccggggacctgcagcgcatccttgagacgggcctgctcatccggggagaggggaagcagctccagcgtgacccgttccaggcgctcgtcgatgtcttgcaggcggtgggcgaccacctcctccaggcggcggcgcgccggctcccagagcgtggtgcctcggtggagggccagtgtcgtgatggcgtcgcggcggcgggagttaagcgtgtagggcgtctcctgggatcgtttgccgccattctccatggcccgctgctccggcgcgtagccggcggtcctgatggcgtagagctcggaggaggagactccggcggtcacctgccagccggtgcgctcgctgacctcggcgtcgtcgatgtcgtagccggcggcgcgcagggcggcggcgttggcgatttctttctccggcgtggtcttgtctacgcaggagagcgtaaaattcaccaggtgaggctggccggggtggtactcgtcgagcacccggttgaccagctgggccgtcagcacggaggcaatatggtcggcctcgccggccgcccaggccttaaagccgtcagcctgggcgttgccggccagggtgccggagccggactcggtcatgactgtgagcttgccggcggtggtcagcatggcgatctcctcggtggctaccttgtaacggcggtcaaacaggtcgacgctcgtctgggatatcgggatggacttgatatcggagtcgtggtcgatgacgccggtggccgccgagtagcacatggccgacatcttgatgtactcctgacgcagctcctcggagcagtcaggaggaagcacaaaaaatgccggcggcgtacccagcctctccaagaacacgtcccactgggccagcgtcgtgctacggttaagcaccagcatctgggcgggcatgtcgatgggccggggatgcagacgcaggatgaggtcctccagaggcacgggcaacggctccccccggtagcggctaaactgggcattcgggttgtatccccagggtccacggtaaccgtcgcggcacatcagccagttgtcgacgggcagcagatgcaggccatcgccgtcggcgtagggctgcaggaatttgtaatggcggcgggacgcctgggacagggcggtgatggcctcgtccatgttaacgatggcgttgcacaggtcggtaatggtgcgctgctggctctcggccagcaggctgtcgcggtcgtccaggtccggcttgaccgtgatagaccagtcgtacttgctcagagcgtcgtcccgcttggtaatacaggtcatcagcatggcgtcgtagcgctccatctgttcccagatccactgctgctcggcataggctcccagctggcagtcctgcaggcagcgccgtatggtatccacgctcaggtagtccagcgggcacacgcgctcaatctggcggcggcgtaccttgtccagctcggccagggcgagtgcggcaaacatggccggcttgctgtcctgggatgccttgtccggcgcggtaagcgcccgctgcacgccctctgcatggagcctgcggtggaggatgtagttgtaaagtcgcttgatcatgagttacgctgctgacggtagatggttgagggaggggcggcctccgaacagggagccgtgggagcggccgccaaacagtccagcgccggtgatgatgcgtccgctgcctggcgccgggagatggtgctgcacgtggccgtcggccgcgcgcagggccagagccagggccgtacaccggtcggagtgtccttccctggtgtgcggggcctcgtaggtatagtccgtgcctctgaatatctgctgcatggcgtgcaggtcctcgcgcacctccacgtcaatcgggatgcgcacacgggtcggagcctcaaaggcctggcggaggcgtgggaagatgagacgcttaaaggccggcgtaaaggtgcagagctcgatccggccaaactcgtgaccctccggatgccagcgcttgaattccttgaccaggacatcgcccataccgatgcctacgcccgtgtagtcgtagcacacccggcgcgccgccttgatgcggtggcgcagcacctccatctggtccggcacggacatgttgcgcagcaccagcacctcgcgggtgaccagcacgtcacccacccgctccaatgtccagcagaccgtcgggtcgttggagcggccaaagtcgatgcccaggcgcaggtccagcttgcctcccaggtaaatggccgggtcgcaggagaccgtggcgctggcggactccgccgtggcgatcaggtcgtagggcagcagcacgttggaggaatccaggaattcgcacatgtactcctgcgcccagccgatggggtcgtccagggattctcttaactcgtcaatgtcgatgggcagtccgtcctccacggccttggcaatcgtcaccacatggcaggaccagtgctgcttgcggccctccacgggttggagcaaattgtcggagatgatcttgtatgtcctggcgccgcggcccgtcttgccgttgggcgtggtgatgagccgtacttttttctcgccgccccggaggggattagtgatggagggcaacacggctctccaggtggcgtcgggatcctcgaaaaacgcgaattccgtcaaaacgagattggcgctaaagcctcgcacggtatcgggcctgccgggcacggccaaaatgcgggagccgttggcaaatgtgatggagccggacttgagcagggtgttggggccgtcctgtcgttcgatttcctcggcagccagggcaagggaaaaagcctcggcccactccttgcacttggccagcgattccatggcctggcgctcggaaggggccgcgatcatccaggtggtcttggcccgcagcatcgcatccctcaccgcctccgccgccgtggaaaaatccttgccggactggcgggaccagatgccggccttaaagcggctctcgtccgccacccaccgtgcctggtaaggcagcagcagctccagcggcgttgtgatcagggaggacatcatggggagtgggtaagttactgtctaacagccgaagatgctgcgcatcctggcgtcgcgctcctccggggtgagggttgattgcgtgacctgtctggcggcgtctgcctgggcggccttggcctccagcatcttgaggcggcgcttgtcctgctccagctgctctgccttaaggatgaggttgaccaggatgctcagcgccttgggatcgcaggacggggaggcggccaggtccaaggcggcggagcgaatggccctcatggtggcctcgtccactccgtccacggagatcttgttgagttcctcggccgtcttgttttgccgggccagacgcgccggcaggatctgggagtggtagtagcggcggatggcctcctggctcagtgtcacaccgtcctcggccaggcgttcctggacatctttgtaagacgcgccggaaaacaacatagcgtccacatcatccttgatgatggggggcaactgggagccgatcacactgtctggtctgggtttgcggagcatggcgttaatactgttaactgttacctcatatctgggtaagctggacgcggccggcgtcggtgatggcgtacttgcgctcgccggtgataaggcaggtggtggacgtgatcaggcgcagggcctccagttcccggatggccaggtcgatatcggcagtgcctgggctcggagacatgtccagggagacctcggcccggagagcagacacgcgctgggtataggcagcgggcagtcggtcgaggacctgcaggatggtaatcttgatattggcgcgggtggtcataaggttttacgggtcttgaggatgtcaatcatgagtttaagggtgccggacatctcgttgagcttgatggtgatactgttgaggcgcttgtgcatgtcgtcggtggtcttggcgtggagggctttgagctccgccacctcctcacgggtcgcgtacttgtcctccatcaagaagcgctggggatcgtcggattgctgcggagccttgcggcccttgaccacccaccatgtcccggacgagccgagagcaacgccgaggatggtgcctactgcctccggcgagatgcctgcggcggcgtctgctatcaggttgagcatcatgattggagcagttgggccagcgtggcggacccggtggtgtaggcgtgatggagggtggccgtggacagctcgcccagctggacatgtccggggtcgtaaatggacttgaaatccccgccccataccagccccagcttatgggccagggccgccacgggcttgtagatggaattcgctccctcgctgggcgtccatacgtccttgccgtcgacaaacaggcagacgtcacctgcaattccgaagttgtgcatgctctgccctcctttggctctggttactctgggcctcttgccgtagagtctgtcctgctcctcatacgtgcggatgccgcagatgagcttccagtcggccaggcctcgcagggccgtcatcatctggcgcaccttgagcgcggccaggggctggagggtaagcaggttgtcctccgtgcgcttgtccagccggccgtagcgggtctggagctgttgatggctctcgcgccacagggccgccgcctcgcgggtcagcgggcctgtcaggccgtcaagccggccccggtaaaaaccggcgaatttcagggagcgctgccaggacagcgtgtcggattgtaatgctgcgtaaatcatgatagctgacagttaagagttgctcacttggaggtggcttgtactaccggagccacaactgcctccggagcggcctgtgaccagagcagcttgtgctccgtgcggtccactaccagagaggtgcctccacggatgactaccacctgcccgtcgctcaggctgacgctggcggcaacggggtccgcgtccgtactgcaggatccgcccagcaggagcatcaaggctcccaggacgaccatcaggcgggaggtcccggataagggtgaggaggagccggagctggggggtatggacgacggctcctgatcaggagcctggctccggtcctccacgggggatgtggagccctccccggcgataagcgatggcgggagggctccggccgggttggcggactggccgctctggccatcctctccggcaagctggtatttgccgccgcttataaactgcagcagaatgttgaccgcgccaagggcgctgaagaattcaatggggttgctgtccagccaggcccgtacatcggggatgatcagagccagcaaggctgccaggttggtccaaaagtatttggacaggtaaaaaggcgtttttccggtggcggtattaccggctccacccggagccgggatctcgtcatgcgcaccagtattatcaacaggaagcgggttgttgttcatgagggcaccttagcccacatgatgccctgtctctattgcgcttgttgcttataatttatttgttgcaaattagttataaaaattaaaggtcgtctgcaacagacgtgcctggctgacggcccgagcctggacggagacagccagggactctacctgacgacggtagagtagcagcttgcgcccttgcgggttgggccgccatgcgatgagctggcccaggcgcaccatgcgccttactgtctgaggggaggtgctcagcaactccgccgcctccgctaccgtgcagcggggaccggcggaccattgtttgattgtcacgtcgtccatgcctcaaccttaccacaattttttgccgtctctaatgtatgacacacccccctgcagagtatctgcaggggggtgcacgaaagatcagtccagcagaaccagaacgagccggtcggatgctatactactcttggcggtcccgttattaacggccaaccaccttggcaattacggcgacgatcagtgcaataacgatactcgatatccccacctcccatagatccagtaatgctgaggggctaaagagggatatcagtatgacccccacagccgggaaggcgcaaaatatagccaatacattgagagcagtgttggattcgtcctgctttttatggtgctccgggatgataaggggacgtgtgtcttgtttggtcggtgattgagatagcctgcggagtaatacatcagacaatggtatccattggtcaccgcctacaggatagaccaacgttgtagccaggatgtgtcttgattgatacatggctaccaagctttcagcagggacaggaccgtggacctgttcccctacagcataataatattgcttatcggtattcattgattattaggcttcttgttgtagttgtattctgtttcatcttcggcgccccttgaactgcaatcattttgtatagataacgtatttgtcactaatgttttatcttcatcaacctcttcttctaagtattccaaggctcctcttaaggtcttttttgcaaataacaaccttccttccagtctatggattctttgagtatagatggcagtttctatgtcggatgtgtcttctaccccccaaagccatcccatgctaacacctagagcttgagccattctccctagttctgcagcacctggagagcgtcctttttctgggttgaggtattctgatattgccccttgagcaatatttgacatatatgctaaatcgctctggctaagatttttgtcaaccaattttgcgcgcagtctgcttacgaataatctgtttacagtttttcctcttgccataattccgattttgtataatctgtttttagacaccgcctcataaatgcggccataaaacagacattagcaaaaaccaatgcaaacacaagaagacatctcgctacagtggctccttagcagggggtatacgccaacggaagcagcagaaatgctgggtgtgacagctagtcatctccgccgagtgctaaagggctccccggacaggggacaatcgttaaaaaaacgcatctgcaccttgccgcgtaagaaattaactgccctacggaggaccaagtaacgatgctacggaccgtcgtcaaactcattgccgccatagcggttatatccctggcattcctggggatggtcaaggtgggcggctggtaccttgatgccgaggagcaacaggtgcgcgacggcctcaaggacccgcgcacggccatcctgccagtcatggaaaggccacacgatgatggacgacacacccgttgacatggacgcgcccatgacggccgaggaatgggccatctggtccgccctctggaacatcccggaggtgagacgccactaccaggtgcctcacgacggcccgctcacctgcccggaactggcccattacctgggattgtccgacaaggctgtctgggagctgcaggacaaggccctggtcaagctgagggtggccctcaaccgttacatcctgcagcaggaaatcaatcgtcaacaacatttcgacaaccaatgaaacacgagcttatgataaccgcggaaacgcgggtgacgctgggcgtcagcgaagccaaccgcctgcaccggtatgcccaggcgcaggcagagatggcggcatgcgccgggcgcaatgccgtgacggcaggcctcaagctgggtaagctgctgaccgagcttaaggccgcgactccccatggagagtggggagatttattcaaggccgggtcaatttaacccatgggttcaatttcgattttacccaaaaaacagctaatcagtatatgccaaatgcgaaccatggttcgcatttcgaatttaccaaaaggacagcagaaaaatacatgcgctgttataaagcggctaaggccaggctctctgccaccgaatccgcccaactggacgccactctgaatgaccggacggctccatcccccctccggaactggtagccaaggccaccgacggagccgagacaccccggcaaatgatgctcaacctgggcgtgattgccacccgcaagcggacaacgcacgaccgggtcaagcccctgggctttaccggctccggcaaccctgacggggcgcaggccctcacccccatggataagctggccaatgacctggccgccctcaatctccccccggaagaactggagcgccgccggcaccaggccgagcaggacgcggccggtctcctcaaacagctgggaacctttgtcgaccagggctacgtccacctgctgcgcctccaggagcgtgagctgtttgccgattccctggccgcttacgcccgcaaggtatccgatgccgacgtgcagagcgtcagggccacgatggatggcatagtcaacggtacaacaacactttaagataatggactttaatatcaccatggacgatctgccgctggtggagcgggacagagtgctggccctctatgcggcctgcaagcgcatcagggaggccagcgcctgctatggcgggcagcaggatgccatccgggatgccgccgccctctgcggtatctccccggtgactatgcgccgctggtacgacatctggcgcaacaacggcgacaatcccctctccctggtggaccgccgctaccgtaaaatacaggcgcgcagccgggtcaccctcagcaaattccttgcctactggcatggcctctgcacccggtgccagcgcaacggaggcatccccacggcccgccagctcctgctcaagacctggacggagaggcgcgacaccatccccggctatgaggactggccgggctggccgcgcgtcccctccggctggagcctgcgcaacctgcagaggctcgctccccaatctctggagacggtggcgctcaagcagggcatccgggccgccgcgccccagctggcgcaggtactggccacccgcgaggggctctggctgggaagtcatttcctctttgacgacgtctggcttgacttgatggtgctttccgggcgggacaaagggcagcccctgcagctgggcgtgctggagtaccttacgggcaagcgtgtggcgtgggggcaaaagatacgccgccgcgatgaggagacgggcaagatgatccaccttaaccagcgggacatgcgcagcatcctggccctgtggggagctaccgtcgggtactccccacgaggcaccatccttgtggtggaaaacggaacggcggctatcagcaaggagctggaagacctgctctaccatgccagcggcggcctgatcaaggtggaccgctccggcatcggaggcgtgcgccagacgctcaagcagggccatggcggccggggcgtgggcaacccgcgccacaaggcggcgctggaaagctaccacaacctgcagcacaaccgtatcagccatctgccgggagccaccggccacgaccgcacgcccccggaaaccctgcacgggctggtacgcgccgaggagcagctcatcaaggcgatggacaagcttcccgcggacaaggccggtcaactcaagcactacatgctgaccatggatgagctgagccgcgagttgaccaagattgtcagcgatatcaacgcccgcaccgaccacaggctggagggctgggagcgatgcgggttcatggtcgaggagctgcgcctctcggcttccgccttctggacaccgtcctccgaggtggagccgtccatggccgcccagatcatccgcaccgcctgcgaaaccggagccgacctggtgcgccggcgccggatgagcccctccgaggcatgggcctgcgaggaggccaaaccgggcaacaggctcattaagctgcccccctggtgcatctgccagatcctgggaacggacatggcccgccccatcaaggtggccagcgcctacatccggatgcgcgacaagaccatccgggatgaagacctgatttacgaggcccgcgtggcgactcctgacggagccgtccgggttctggcccacggcacgtaccagggctacgttaacccctacgatgacaatcagctctttgtgtgcgggcaggacgggcgcgtcatcggtacggcctccctcgtgcagagggtctgcacggcggatacgcacgccgtggagcaggccatgggcaaggcggccggatatcgggagcagcagctggaatatgcccgcatcatcggagccaataccgaggcggacatcgtccgcaagcgcgagcacaacaggcgcctgatggagggcaagccggtgacggccgccgagtatgcccaggcatactccctcacccccactcccgccgataagcggaccgtgaccagggcagccacggcggcggccgagtccatgccggacatcagcctcatccccgccagcggcagcaatgacgacgagctgccccacgacctgcccgatgtaagatttttataacataacagacacaataataacaatatggacgatattacaaaaatcaacaacaatgccaacctgagcaggtatctggaccgcattcaggatacgccgtacaaaccggctcacaagaagatgctcaccgacctgatcaactacgcagtagaccatgactggacgctgcgcacgctggccgacaagctgccggtgagcacgacggtcatgcaccgcctgctgattggcgcttaccagtccccgaccggccctcacctttccaagcttgatgacctgtgcggcctgctggccctgcgccagcaatcagcgtctgacgggccgtttatcgagacggctctggcgcgctacgtgatgcagattgccgagctgacccacgtcaatcaatacgcctccatgctggtgggcaaaacgcagtggggcaagacctgggcgctcaaggagtacgcccgccgccatcccggtacggttatcctggtgcgctgcccggtggtcaccagtccaggacggctgctctaccgcattgccgcccaattaggcctgtcggtcaaaggcaacaccgagttccagattgccaagattgtcaaccgcctgactccggagcacctgctcattgtcgacgagatccaccacgcgctggacagcgacaagaccggacgcaagggcattgaacagctgcgggagatttacgacgagacccagtgcggcatgctcctggtgggtacgcccgtcctggccgagtacgtcgaaaaaaatgacaagtggaaaggcatcctggagcaaacctccaagcgaggggcggccaatatctaccgcctcccggaccatatcgagacccgcgacctggaaaccctgtggacttattacggctatccgtcccccagccgggccatgctggccaccctcaagcagcaggccaatttgtacggattcggcaagaccaccaagcgcctgcgcaaaggggtggaggccgccaacaatgccggggtggaccttacctgggactactacctggccgccgtcaagaagctagaagaaatggaagccggcaagatgccggaatacgtataacccccccctcaaaaaaatcatgcgcaagaagaccatcaagtacagcatcgttgacctgggaggcacccgatatgtggttctccgcctggctgacctcgacgccctcatcaccacgcatcacagcctttccctggaacttatcccggtattgagcgaggcgcagtgggaacggtaccggcagctgctttacattacccagcatatccatgttgatcgggtcagccattgcaaggtggccctcctgaccaagacggactatgactgcctcaatatggccatatcccatctgcacgacctgctgggcaatatccgcctggccaacatcaccgtcggccccaccgaggacgaccagcctgactcaacttccaaccaataacaccacaatcatgtacagcaccaacactaacaatcaacaggacagggggcggcaagccctcaatgtcaaaccggccccctggggaggccattatatcatccatattgaggatgttatcacggacacgggcaagcacgggctgtctatttacaacgagaccctccgggaggccgaccacgagacgccggcatcacgtgtcgacacgctgctcaagacagtcattgcccgcaacacgaacgctatcggcgaagtaatggccgatgccatcaatcgcaaccgggagggccaacaatgatagatctgtttaccgccacacctgcggagcgtgaaatcattgaacgcatcgccaagagggctgtcgccctttaccgtaaatatggcaatacagatgtcgatgagctggatattcagatggacctggaggcatgccattgcaacgggtgtccactaaggctcgccgatatggaacaggccgataacttcaacttcatgcacgatgtcacgggcatcaacgtgcatcttaaccacgacacgggcaagttggagaggtgttttcttccccggtttaccgatatggagaggagggccagacgccatgactgatcccatctattgctattaccaccggcacgcgcgcctggagatcatccagcgccatgggcagacctatgcggtctgcccggagtgccgaagaatcatgactgagggcatccgctcagagctgaaccgcgccaatcacggcaatcatctttcatccgatgatctggtacacaagctgatcaacagagccgagcctgttaatcccatccctcccgtctacatctacattgaccagccatgacctacgatcccaatacactggcctatctcatcggcctgcaactctcccgcttccccggcgcgtgtgatcactgggtagtctgcgacccccgctggccgggcatgatcgccatccggctggagcagctcggacaatactacgtccctgtagatggagagcgatttctggagtggctcagcgccacgccagaccttacctggcagcatgtcgttaacatgctggccaaaaagagaaaacaactcaacaagagaaatacacaataacaatggacaatgagaaatatacatgcccgcactgcggcaagctcagacccgtcgatccgtcaacttttaaggttggagatgtggtctacgtcaaccagacctgtatgaccagcagcaggtctgccaaccgaaccagaatatcactcagatcagccggatatgatggggttattgaggatatattgtcaggtgataaggcggtggtccggagaggcctcaagggacacggcaaacaatacaccgtggctcttgccgatcttactccggacgatgctcctggggtactcacttacgtcctgctggggcagtgccaatgtaaccaacaaccaactacagactgcaatgggtaaaatacgcacaaccactaaagcaaccgaccagcaggttattaaggacaaggctgaattttgtcagaccctggacgacatcgcccgcaaaggcgtcgagctggataccttgcaagccgccaaggaggccgccatgcagcaagtgctcacggatcacgaccccaaaatcagcgagctgaccagggagattgaccggctcaccaaactggccgagcaatgggcatccccccgcagggacgagctgttttccaagggccgtaaatccggcaccaccgccctgactacctacggctaccgcctggggcagccctccctcaagcctgccaagggctggacgtgggacaagattgtcgccctgctcaagactacgcgccgcaaggcgtacctggtcaccaaggtgactcctgacaaggatgcgatccgccagcatgtcaagcctcacaagctcgccaagctggggttggagatcaaacaagtggagactttttacgtagagaggagtaccagggatgactaagattgaggttaaagactatggataccagaccctgctgactatctggacgggcactgatagaggaggagcaacagccactcttgtctatctgacgcccaagcagcggcaacaactgatcaaggctctacaaaatcccggtcatgaacaataagccacttaccaagcgacagatcgccgtactgtccattatggccggcaaggcctacaagcgtatccagtcccagggctgccccctcccgtctctgagagattggaggcacgacgaggtctgggcagccacagggatcaccgagtcactgaccaaagccacccaggagcactacgtacctatctataataggctggcatcctatcttggatgtgcgcctgtcaaggaccgtacctggtcggagatggacaaggccatacacaatctgcgtgatgccatgcagcgctatgagataactccggactatctggccgagattgtgcgcgaccagctgcacctgccttgcacgggccgggacgtgtaccaggcattgcgcaacaaggccgccgtggaacacgtccggcacctgatgtacaccgtcatcaaccggggacgggcggaggctcgcaagatggccgctgaaaccgggcaggagacctacgagccgcacgctgatccgtgcaccatgccgcccggcaagctggctgatcatgtcggggctgtacgtattgttcccactcctggaccgcataagaccactgagcggggattccgcagtaatatatggatgccagatcaggaggtgcagccatgaatgatcctacttatccgctcacatggccggaggcgctcatggctgccaaggatggggccgtcattgagtgctccgcctgcaatcctgaatatggtaatatcacggccatatacgatccaatcaaccatgtcctagtggattggatatggacggactgggttttgactccggacgcagctgacatcgctgccccctggcgtattgtctcaccagatagtgaggaggtgctgccatgagcaggaggcttgctctgatacccttgcgtcctcggtactgggatatgtaccgggatggttccaagatatgggagctgcgcaaggtcttccactcacccagaggggtggatggattgatcatctacgctactgccccggtatcacggatcgttggcgaggttgacctgattagtacccatgtcggctatgtcaatgatgtatgggatgtcgtcaaggatggctgcggtattacgcgcaagcagtacgatctatactaccaggatcaggagatagcgatcgcataccgcctcggcaatgtctatgattaccctaccagcctggggatgcttccagctcctcagggataccgatatcttaggcaagagatgtatcatcaattccgatgccagaccggacgcccccgcctggtgcatgcctcctgtggatgcgcggattgaaataacaaaccatcatgaaaaccttaaagccgggcgataagcttaattgctatgttattgatcgcaatggccaacagtccaatctagccatccaagcacttgttgtcaccaccaagcagtcactgtatgctgatagtctctattctactgtcctgtgcatcattgacgaaaggatagagaaactgctggaggagcatcagggcgaggaaatgacgccctttgtccgcgctttatgttgtgatgactaggctaatggtgatacaataaaggccgtcaggttgttcctggcggcctttttgttttcaatcatcttctctctcatccctgatcacaatccacacgttgtcgagcatatcccgcacccagcacgtcgttttacttccctcacgagttgtccacatcaacacgacagcggtatcatgaaggtgataaatttgtgggttctttttcttccggtctgctggggatataacggtaacggagccgtacaaggggatacaatatgtaggtgtacacatgcggggcatcctatcatgattttttaccttgtcgttgctctatcacctactctttgcagctcttgtgcagcatccctgcatagcttgtgtacttatatcagatacttgtcatttaccctcttttcagctccgacttttataagatagctcatgactggcctgatcctccttaactcccgtgttttctagggttccaacggatttcaaccctgattcaacttatatcaactatcctgtcattcctcatctccggtttgtgggtcgcacccacacgggtgcgtgaattgaaacatctgctggacgcacggcccggtgtggctcatttgtcgcacccatacgggtgcgtgaattgaaactcaacccagcaccgccacccttaccccgttcatgtcgcacccacacgggtgcgtgaattgaaactgttggtaaataaccttggcaatcgtccacggaacagtcgcacccacacgggtgcgtgaattgaagtttttatgtatgtttgacatatttaaatacgaatcgttgttttattaagggagggagatatattgaaataagggtatttgttgctgaagaatgaaagatggatttttgtgttttttgttgaatgcaatattttgacggaggaagttggtttttcggctgatagaggagaaatgacgggaagtattattggacgaatatgaaaagatattgtctggtttccgggttatgtctgtgcttgttcatggggatattttcatgtattccggaagctccggagcataagacggaaaaagatgcctcagccattgttctggatgaggattcggatataatctggaggaatttttctttgggccgcgtttcattcgatgataaggctccgcatagtaaaggttcccgcatttttcgccgattgattccagatacggaggtttatatccgtcagttgtcccgtattgttctccatacgttgtatgagagtcctgaagaatgtattgttcctgtccaccatttgcgtttcatgctggaggataccgatggcgttgcctgcaaatggggaggaaatggagtggttgccatttcctgcagcacgcgccatattgaggggttgtttaaaggatgatgatgcggcgaaggtttattttgaaattcgaggagtcttgttgcatgagctaacccatgtttaccaacaggaaccccaggggataggttcctatggaacgaacagggaatttagagcatttatcgaggggatggctgacgccgttcgtatagctaacgggggattccatagaggagcttaccgtcctacgggcggcagttatatggatggctacctccatgcaggttatttttttgtgtggctgcgggattataaagaccctgaatttctacgcaaattgaaccgtagttctcttgaggtcgttccatggtcgtttgatggcgccgttaaatatgccttgggcagcgagtatcatattgatgagttgtggcgggagtatcaaagggtgatggaagaggagaaatagaggcgcttcatagttcaggagttttgatgggatatctagacaggaggctggaatagaaggaatggccgtggagagtgttcttaaggcgtgggtatttctcgtttaccatttttgaaaagcaaggtctgagtggcccggcagaaagacaggattcctcatgcttcgcagtatttgaatcctgggcgggacagggtgccttggacagagggatgggaaacggtgaggaggagcgaagcccccatgctgcatgctggaaacgggaggcagggatattctttcggctggacaaacggagggacggaagacattctaggcgttccatggagggcatacgctattacaaccgctatacgggcagggaggaacgggagcaggtactgggggagaagtatatgcaatggatttacggcactgcttcggggaaggcggcactgcatgtcctgattaaacgcggcgttttttcccgtttgctgggttggttgaagaatcgcccttccagcgcccgctccattccctcctttgtggaggagtacggcattaatatggaagattctctcaagggagtgggggagttcaggcatttcaacgattttttctaccgccgcctgaaaccgggagctcgccctttggccggcggggaggatacggccgtttttcctgcggatgcccggcacatgggttgggaacgcgccgaccgaattaaaaacgttttcgtgaaagggcagcgttttgacctgccttcccttctggggagcgacaccctggctgagcggtatgcggccggcgccgtcgtcttgtcgcgcctgtgccctacggattaccaccggtttcattttccggtgtccggggtgcctgggccctggacgaagctgggaggcccgctggcaagcgtatctccgtattgcctgcgcggccgtctggcgtggctatggactaataaaaggaatttgaccctgatccggtcagcgttgtggggagaggtcgccatgctggaggtgggggctaccggagttgggttgattgaagagacgtatgttccgggtgttttctccgcaagaggggcggagaaggggtattttgcctttggaggctccacggtaatgtgcttttttgaaccgggaagagtcagtttggcttccgatttgttggaaaagacggaagaaggcctggaactgtttgcccggcagggagacatgatgggcacggcagcgacatagcctccgggctggcgtgcctgccctgcaatgttttgagtagggctctttcctggagcctgatgacggaatgccggggatggattccggcgtttcagggcggattttcggatttttgattttccgaagtgccaggcgggttatttcattttcgcaatggcgtgggccatatccggagccttgaaggtagaggagcctgccaccagcacatccgctccggccagagcgcattgagcggcattgttttggccaattcctccatccatttgaatgaggaaggaggcgcggttttccgtgcgccattcggcggctttttccaccttgtccaatacggaaggcatgaaggactggccgccgaagccaggcactacggacatgaccagcagcaggtctatttccgccaggtaaggttctacggcttcaaagggtgtggccgggttgagagccaggccgttttttactccggcttcccggattcgcccgagtgtgttgcgaatgtagtaggagtctcccagttccacgtgaaagcagatgaggttcacacctgccctgacgaagcggtcaaagtagtggtccggccgttctatcatcaggtgggcatccagaaagcggttcggccccaccgcttttctgacggcggcgcagatttccgggccaaaggagatgttgtccacaaagtggccgtccatgatgtccagatgcagccagtcggcaccggagtcaaaggctcgccgcgcttcctccccaatgcgggagaaatcagcggccagcagggacggggagattatggtcatggctgagggaggcttttcgggatgtcagttggctacaatgttgacgaggcggccgggtacgacaattaccttgcgcacagtgacgccgtccaggaaggttttcactttggcggaagccagggcctgtttttccagttcttcccgggagatgtccttgggcacttccagtttgtccctcagcttgccgttcacctggatgaccatgggaacggtattttcctccagcagggcttcctcccattcaggccagcttttctggcaaagctgcgtctgggccagagccgggaaggttgtttgcaggcggctgtgtatttcttccgtaaggtggggggcaaagggattcagcagggtcaggaaagcatcatagtcctgaacgtccaccacatccgcggaggtcatggcattggtgcattccatcattttcgcgatggcggtgttgaaggacatgccattgatgtcctccgtcacttttttaatggttttgtgcaattccttgcgtacggcaagcaccccggcttccggagcgttctccaccagtttggagttgatttcccattctccttcctgattttcccggaaggccacgcgccagacgcgggccaggaagcgggaaatgccttccacgcctttggttgcccagggtttcacgtccttgagagggcccatgaacatttcatataaccgcagggagtccgcgccatattcgcggacgatgtcgtccggattgacgacgttgccgcgggatttggacattttctggccgtcttcccctaggatgagcccctggttgacgagtttctggaagggttcattggtgctgaggtagcctaggtcaaagagtaccttgtgccagaagcgggcatagagaaggtggagcacggcgtgttccgtgccgcccacgtacaggtccacgcctccgagggagccggcggagcccatccagtattgttccgcttcccggctgacgaagcgttccgtgttggccggatccaggtaacgcaggtagtaccagcaggagccagcccattggggcatggtgtttgtttcccggtgggctgtgggcgtgtaggctatccattccgcagccttgaccagcgggccgcgggggtctcccgtgggggcgaagtcgtccagatccggctggagtacggggagttcgctttccggcagggcgcggtggcgaccgttttcccatacgatggggaatggttccccccagtaacgctggcgggagaagagccagtcgcgcagcttgtagtttactttgcggcgtcccttgccgttttcttccagccagaggatcattttttccttggcttccggagtaggcagcccggtcaggaagccggagttcacgctggaaccttcataaccgcagaagccgcgccagtccgtgtcttcactgggcggctgaactacctggagaatgggcaggccgaagacctgggcaaaggcgaagtcgcgttcgtcatgggcggggacggccatgatggctccggttccgtagcccatcagcacatagtccgcgatccagacgggaatttgttttccattgaccggattgacggcataggctccggtgaagacccctgttttttccttggagaggtccgtgcgttccaggtcgcttttggaggcgcactgggcgcggtattgttccacagcatgtttctgttccggcgtggtgacggtatctaccagagggtgctccggggaaagaaccatgtaggtggctccaaagagggtgtccggcctggtggtgtaaacagtgatcgtttctccgtccagggtgaagtccacttccgcaccttccgatttgcctatccagttgcgctgaagcagtttaatggattccggccagtccaggggctccagctcgtcaatgaggcgttccgcgtagtccgtgatgcgcagcatccactggcgcagggggcggcgttccacgcggtgtcccttggatttccattcctccacttcctcattggcaaggacggttcccaggtccggggaccagttgacggcagcttccgctacgtaggccagccggcgctggtcgatttcttcccggctcaatccctgttcctccagttcggaaacggggcgcgcctttttcagttccttgttgtagtaggagttgtaaagctggaggaatatccactgggtccaacggacgtattcatggtccgttgtggctatttctcggtcccagtcgtaagagaaccccagcattttgagctggcggcggaagttgtctatattccggaaggtagtgacggaggggtgctgtccggttttaatggcgtattgttccgccggaaggccgaaggagtcccaccccatgggatggagcacgttgaagccgttcatgcgtttgaaacgcgctacaatgtccgtggcggtgtacccttccggatggcccacatgcaggcccgccccgctggggtaggggaacatgtccagcacgtagtatttgggtttggacgcatcaaagccctcttctccggggttgtttactttaaaggttttcctctcgtcccagatctgttgccatttaggttcaaaaacgtcaaagggatatggtttcttgcgctcggacatgacgggagggaatgtatactccgcccgcgggtcaatcaagcctaaacccggcggaatgcaggcgcttccaatgctccgggggcatgatgccgtttttcggaaaaaaggggaaaggtaagaagacgtttgcgcgtatttcttaactgaaaggtttttgttgattgcgaccatgaagtttacttcctgtattatgtctgccgtctgcggagcattgttcctgtttgccggggcatcctccctgggcaatggttccaaccctgtttccggaaagaagcccaatatcatcgttttcctggtagatgacatgggatggcaggatacttcccatccgttctggtccgacagccagggcaacccgaagaaaacctttttgaacaggcgctaccggacgccgaatatggagaagctggcttcccagggcatgacgtttacggatgcatatgcccatcccctttgcactccttcccgggtgagcctgatgtccggcatgaatccggcgcggcaccgcgtgacctgctgggtacgggaacagaacgggacgacggacgccaacagcaggagcctcctgcctccggactgggcgttgaacggccttcagcctataggcactcccgccaggggaacgacaaaacgccccatttccggggaggatatgcgctatcacatgacgcgtccttttgccacggcggctacactgccggagatgctgaagaagtgcggttatgttaccgtccattgcgggaaggcccatttcggcacgcagggaactccgggttccaatccgttgaatatgggatttgattataatatcgcaggtacggagatcggccatccggcggattaccgcggttccaggcattacggaaaggggtttaaccatgtgcgcggactggatgagaataattattaccaggacgatgtatttttgacggaggccctgacgcgggaggccattaaacgcctggaagccatcaggaccaatcccagggaggctggcaagcccttttatctgtacatggcccattacgctttgcattctccgctggatgagcgcgcttacgacaagaggtttgcggatgcctacaaaaacccggaggacggccacaagtggtcccggacggagaagcattattccgggctgatcgaggggatggacaaaagcctgggggatatcatgaagtatctcagggaacatcatctggaaaaaaataccgtactggtgtttatgtcggataacggaggcctggccatctccggcagactgggcaatgaagaggccaattaccctctttccttcggcaaggggtcgtgcatggaaggcggtatccgggagcctatgattgtttcctggccgggcgtgacgaagggcggttcaaggtgtgccgtcccggtggttattgacgattttttcccaactcttctggatatcgccggatgccggaacgtagaagttccgcagaagcttgacggcttaagcctggttcctttgctcaaaggcggccggtttcctgaagaccgcccccttttgttccaccagccgaataattggggggaaggcagccggcaggcgcctcagtatacttcttccaccgcattgcgccaaggggattggaaattgatttaccgccacctgacccagagctttgagctgtaccatttaaggaaagatatcggcgagaaggaaaacctggcttccagggagccgcggaaaaccagggaaatggctgttgtcatgggcaggttgctccgggagaggaaggcgcagatgccaacctataagaaggacaatgagctgggcgctcctgccgggagttccgttccgtggcccgaccaggtgaaggggaatggtttttgatgatccgcaataacgtttttccaaagttttttcataacccccggcaggattcacatcccgccgggcggattgggtcgaggctggggagtccgcgcttccttttccagtagttttttctgtccggtataggaatggtgtgtgttttcttttccggatgcaggatcatcgtttttcgtgaatgaaggcctcagcttttttcggagcaaggggaggaatgagcaagggaactggttcgggagggataaaaaacgccccgacggatatggcgtcggggcgtgacaagggttaaataacgaagttccctgaaagggagggtttaaaaatcgtcggtgacagcggcatcatccgttgtcgtggtatcttcgctttcagcagcgctgtccgcagagggttcctcttccgttccggcagtatcgtcggcaggagtttcttccgtagcgcctggttcagaaacggacgttgctgcggatttggcagcgggcgctgcggacggagcagcgcccttgggcggaacaacgactttcatggccggaggggcgggaacgggagtttccagcccgtcagccttgcgggtgctgacgcggagtccgtcagcataagccaggtttttcaggatggcatagcccagggcgggagcccggtccgtcgtgttgaccagcatcttgaagtggttgttgacggacatcttgcgggcgtccttgccattgcggaagggaatgatgcctgtcatgttgccgtcattgtcaatgcagatcgcccagaaagagcggtctacctggatgaagtactgcgggcggatgtagtccatcgttttccattcagcgcccttgatgtattcctccatggcgcggcgcgcattggccggcatgctgccccagtcagcgtaaacccgggaggtcagcgtttcacggccattgtagccgtgcacggatacgtgctgggcagtagcaaattgacgggcatagctctcgggagaggcaggttggcaagagctggtgaagagcgctgctccggcggtcaggatgcaggctgctgcagtagtgaagggatgaatgttagtcatggcaatcgcaatggttacgttataaaagaggaaaatacatcccatttcaaggaaaagaatgcaggaggtaccgttttgtgccgttttttgacgtttccgtttgatgcggggggctggcgggagtggggaaggcgttctcatgcccgtctcgcaggtatgatggtaaattactaaaatttttctcgcaaatcgttctgaatcgcttaggttgtcgttgctttatgtccgcctttatcatcagcctgccggccttggaacgcaacgctcttatcctgagggatgtggcggatgccgcagggtgccgcatcgctctggcgctgaaggggttttcctgctggccctgttttgaggccctgtccccccggttggacggctgctgcgcttccggcctgtgggaggcgcggctggcccggcgcaggttcgggaagcatgtgctgacttattctcccggccatgccccggaggaaatagcggagctggcggagatttccagccatcttgattttaacagcctgacgcagtggagccgtttccgggaggaagtgatgcggcatccccgctttgtttccggtgaattgaaatgcggcttgcgcgtcaatccccaatgttccaccgggcatacgcccatatatgacccctgtgcccccggttcccgcctgggcgtgacgctggacatgatgcagggggcggacctgtccggcatttccggtcttcattttcatactttatgcgaacagggagcggatgacctggcggtaacgatggatgcggtggaacgccgcttcggccatcttttgagccgcccggagatttcctggctgaatatgggaggaggtcattggattaccaaacccgactatgaccggaagctgctggcggcacttatccgccgcatccgcgaacgctacggcgtggaagtatggctggaaccgggagaggccgctgccattcataccggggtgctgcggtgccgggtgctggaccttttttccgcggagggggtgaatcatgccattctggatgtttccgcatccgcccacatgccggatacgctggaaatgccttatcggccggatgtgttccagattgcaggagacgcttccctccgttccgcgcagcagcccgccgtacggttggaaggggagagctatgcgctggcggggaaggccggggaaaaagcttatacgtaccggctgggcgcccccacgtgcctggcgggagaccggcttggagattattccttcgcggagcccctggcggtaggtgacgaacttgtgtttgacgatatggcgcattatacgatggtgaagactacgtttttcaatggcgtgcgccatccggacatcgccgttcagagaaaagacggttccgtggagacggtgcgccgtttttcctatgaagattttgaggcccgcctgggctagaatatttgaccagacagattgacatggcagcagctaaagaaggcatcaagcagaaagtccgcgggtggagtcaccatgattccgcagatttgtacggcattgacgattgggggaacggttatttccgcatcagcaaaaagggagaggttaccgtacgcctgaatgacgaggatggaggaaagaaggatgtcagcctgtgcgatctgctggaggggctgaaggagcgtgggactaccgttcccgttctgttccggttccgggatttgctgcgcagccgtattgcggagctgaacgacagtttccggaaagcaatcaaggaggcggggtaccagggtaagtaccagggcgtttaccccatcaaggtgaaccagcagcgccaggtggtggaggagattgcggagttcggcaccaagtatgattacggtctggaggccggttccaagccggagctgatagccgccatggcccatatgcacaatccgaatgcctatctgatttgcaacgggtacaaggatgacgagtttattgacctggcgttgacggcccagaagatggggctgaatatttttattgtgctggaaatgccttccgagctggacgttattttggagcgtgccagaaggatggatatccgccctaatctgggcgtgcgcgtcaagctggcggccaaggggtccggtttatggcaggaatccgcgggggataagtccgttttcgggttgaacgcagcccaggtggtggatgtggtggataagctgaagcaggtggatgcgctggattgcctgaagctgctccattatcatcaggggtcccagattccaaatatttccgtggtgcgcgaggggctgacggaggcggtccgcatttacgtggacctggtgaaggagggcgcccctctgggcacgctggacatgggcggcggcctggccgtggattatgacggttccaagacgaatttccattcttcctgcaattattccattgcggagtttgcccgtgacgtggtggaggttgtgggagacatgtgttccaagtacggggttccccatcccacgctggtgacggagtccggacgggccgtagtggcctattattccgtgctggtgttcaacgtgctggatgtgacgagcgcgccgggcgaggaacctccgcccgagcttccggatgacgctccggagctgttgaaggcttttgcggatacggaccggacgctggccaggaagaatatgcaggagtgctataatgacgcctgctattaccgggaccagttgagagcccagtttttttacgggaacgccaccctgcggcagcgcgggctgggagaggcttattattggcatatcctgagccgcatttcccgcatgctggcggagatggagaccattccggaggatctcagggaactttcctgctccatggtggacttttattacggcaatttttcactgttccagtctcttccggattcctgggccatccgccagcttttccccgtgatgcctctgcaccgtttgaatgaacggcccacgaataaggccgtgctggcagacatcacgtgcgattgcgacggaaagatagaccatttcattgaccgtgaggacgtggcaaccgccctccccctgcatgccatcaaacccggcgaggacgattattacataggcgtattcctggtaggcgcctatcaggagaccttgggggatttgcataacctgctgggagatacgaatgtggttggcgtgcatctggaaggcggccgccccgtttatacccatgaagtggagggcgatacggtgtccgatgtcctttcctacgtggagtatgatcccaaggagttgatcaacaagttccgcacgtttgcggagcaagccgtagccgaggggaaaatatctccgtccgaacgccggagagccttggaagtgttccgttccggattgaatggatacacttattacgaactgtaggaaacggtcttgtcttttgcttcaacagggagcgtttgtcccgtgccggcgcgttttcctttgttgcggatcaggagaccagcggttcttccggcggtttcgtttcttcaatgaccttggctggcgtcagggcccagaagcgcgtggccgtttgcggagagatgcctttcatgttcaagtaccgtgtgcggagcagggaggaggagcggtgccccatttccatttgcaacaggttgtagtccttgaagtgcttggcgtggtagctggcgtaggtgtgccgcaggcagtccggcacccatgatttttttcttcctccccagccggcttttttccggattttgcgccacttgattgtccaccctttcgggcagatgggagttccgggtccgggtttggtcctgtcacggcagaatttgagccatttggcgagcacgggcaggatggtgacgtgcctggcgcctccggttttggtatgcttggagttcagaatgatacagccgtctcggagagcgatgttttcccagagcaggcgttccacttcctgcgggcggattcctgcaaagatcatcagcgccgctccggctgcgcagcttccgtcaaattcttccatggctgccttgagaagctgagttatttccttcagcgtcagagcggggatttcctgctcctgcagaaaaggcgtgtctacgcggaggatgggattctcgtcacaccatccgcgtttgacggagaacgagaaaattccgctcaagatgagcctcgctttgtgcctctgccgggatgtggtaaaggtattcatcaggatgttctggcattcctccacgctcaggttgcgcagggaggtgtgttccagttccggattgctctttttaagcttgtggatgatgctcctgatgtccgtcagcgtccggggacggcggtggtttttggaacgtaggcattccacggccgccgtgccgaaactgacggtttgatgtttgtttttaatggcgttcaatcccagggagacgacttcccggcaccgggtaatggtacagatttcatctccaagggcttccttgatttccaataccagccttgcagcctggatcagggtgactgattccccctccagaagtgcggctccgacatatttcaatttgtttgtattcggtgcttttttcatgttcatttctcgtgtttgtccaaacacggttttaatgaaaaaggctatccttataatggggaaaacttatgctttccactagaaaacgcgtaaccgtcaaggatatgttgttacttatgttttctttgaaccggccgcaaaatcaaagtttctgatggtgcaggaaccgaaaatgttagaaagcgcggctccctgtgctgaatgtcaagatggacgtgacttgtccggcatgagtatatttctgtcggaagaggggtaaaggaacggccggatgaaagtattttatatggctgaacgtatggtaggtactgcttttctgtaccatgaacatcagaattcattctttcaacgtatcatgtgccggcctttgctgcgtattggggtcttttttcgcggcggacgcccgtgagatttattccctgaacggttcctgggatttcagttttaacgggaagcctgctgaaaaagtgacggtgccccatacatggaacgcagaggatgccgccaatggtgctcagtggaagcgggaagacgccaaatccgtcaacagtgacgcctaccgccgcgggccggccgtttattcgcgcacgcttccggtggagcccaggccgggcaagaggtatttcatccgcggcgggggagccagcattgtttccgaggtttccgtcaatgggaagcctgccggcagccatgagggggcgtttacggctttctgttatgaaataacgccccttttgaaaaaaggctccaatacgatttccgttctggtggacaacacgcagcgtaatcatatcgccccccagcgcggggatttttccatgttcggcgggctgtaccggcccattgaactgattgagacggacggtgtctgcattgatcctcttttttatgcttctcccggcgttttcatcaccgcaaagtctttaagcaaatccaaggccgaggtggaagtgaagacccttctcaattcggacggaaaggccggggatgtggatgttgccgtggaaatcctggacatgaagggcaggaaggtagccgggaagacggtaaaggccgccgccggggaaaagaatagactggaggttcccgtaacgctggcaatcgccaatcccgtactctggaacggagtgaagaatccttacctgtaccaggtgaaaacttccatcaggacggcggatggccagacggatgagctggtgcagccgctgggcctgaggacggtttccgtcaatcccaaggaaggttttgtcctgaacggaaagaccatgcagatcaagggggtcagccgccatcaggatatgaaggggaaggggtgggccctttccccggaagatgaggcgcgggatatcaggctgattgcggatatgggggcggatggggttagaacgggccactatcccgcatccaccaatatttacgacctgtgcgacaaggcggggctgattgtctggtccgaggtccccaatgtcaacctggtgtgggatacgccggagttccgggagaataaccgcctccaggcccgggagatgattttccagcattggaatcatccctccatttgcatgtggggaattttcaatgaaatcggacaccagaccgaggctgccactagaggagtggacatggaagctgagttgacggaattgaacaagttcgtgaaggagacggatccctcccgcatgaccgtgggggccagcaatcaggcgggccgcagaaaactgaacaatattcctgaccacatcgcattcaatacgtatcccggctggtacggaggagggcccgaaaccatgaagggcaacctgaacggctacatccgcgactatggcggcaagatgggcattgccgtcagtgagtatggtcacggcgccagcgcgggcatgcatgagaatccggccaaaaggccgtctcccaccggattctggcatccggaggaatggcagtcccatgcgcatgagatcaattacaggtgcatcagggaaaggccggaggtgtggggggcctttgtctggaacatgtttgacttcggttcctcttcccgttttgagggggaaagccccggcattaacgacaaggggctggtgacctatgaccgcaagacgcccaaggacgcctattttttctacagggccaactggagcccccgtcctaccgtatacatcacatcccgcaggtttgcggaacgtacggaaaaaacggtgcccgtgaaggtttacagcaatggttccgtggtgaagctgagcgtcaacgggaagcccgttgggagtgtcaaaccggatgatttgaagcgcgccgtctggccggaagtgactctcaagcccggcctcaacactattacggccacggcttccataggagggaaaacgtacacggattcctgcaagtggacgttgaaccctgccggaggtgacgggaagaaggattcagagcgttatcaggatccgtccctgaaaaagtataagtaagcaattccatattcattccgagatgaagacggtacgcgcgtttctgttttccgtgatgtgtctggctccggctcttcccctgctgggggatgttccggattgggaaaatgaagaggtgacgggaatcaataaggaggctccccgagcctccgtttttccgacatcagataaaacgttgagcttgaacggggattggaagttcaaattttccatgactccggacgagaggcctgccgatttcttcaatccctcttattccgtttccggatgggatacggtcaaggttccttccaactggcagctttacggttatggaacggccatttacacgaatgttccctatccattcaagccgaatcctcccaaggtaatgggggaaccgcccaagaactggccggcgtacagggagcgtaattccgtgggttcctaccgccgggatttcaatttgcccgtttcctggaagggagagcaggtgatgatccggtttgacggggtggagtccgccttttatgtgtgggtaaatggccgtcaagtcggctattccgaagattcctatacaggggcggagtttgaccttactccctatgtcaggccgggcaggaatacgattgccgtggaagtataccgctggagcgacggttcttacctagaggaccaggatttcctgcgcctttccggcattttccgggacgtgaccctgtttgcccagccgcagacgcacgtgcgtgacctgttcctgaaggccggactggacagggaggattacacaaccggggtactggacggaacgttcaccatccgcaattccggtaaaaaggatattcccgccggcatgaagctgaattattccatcgacgggatttccaccaaattgaactgggagggcaggaacggttccggccgcgtgcagacggacaacaggggaaggctggattccggaacgctggaggttccctccattccctccggaggcgaggtgcagatttccctgaacaggaaatttcccggtgtgaagccatggacggcggaaacgcccaacctgtacagggtgacttattctctgaatggaaaggatacccgttccgtcaatatcgggttccgttccgtggagattgcggataacggcgccgtgctgattaacggcagagccgtcaagttcaagggtgtcaaccgccatgaagcccatcccgattacgggcgcgccattccgcgggaagtgatggaaaaggacgtgcagattatcaaggcgcataatatcaataccgtccgttgttcccactatcccaatcatccttatttttatgagttgtgcgaccgctacggcctgtacgtgatggacgaagccaactgcgaagcccacggcatccgcaatagcagcatggatatttcccggaagccttcctggaagaaagcccatgtggagcgcaatatgagcatggtgcatcgttccaagaaccacccttccattgttttctggtccctgggcaatgagtccggaaacggccccaattttgaggcggcagcggcggctatcagggcttatgacactacgcggcccctccattactgcggatttccgcacggccacaaggccgtggatatggattccgccatgtatccgcccgtggaccgggtggaaaactgggggaagcagaaaacttcccgcccctttttcgtgtgcgaatatgcccactccatggggaatgccctggggaatttcaaggagtacatggatgccttcgagtcttccccgcgcatggtgggcggggccatctgggatttcgtggaccagtccctccgcgccaatcctgccggaaacggcatttacaaacccgcccctttcaagggagtaacacaggcttacggcggcatgttcggagacaggcccaaccaggccaatttctgcgacaacggcattattcttggcaaccggaacaccacggccaagacgaaggaggtgaagaaagtataccagtacatggcttttgagcgcaaggacgggtctctgtccgttcgcaacaaatattttcataagcctttgaaaggttatacgctttatctggtatcccttgttcccggcggcggccatgccgtggagcgcatggttctgccggaggttccccccggcaaatccgcaacggttaatctgccttcagccgctatgcagaccggttccctgatggttctggcggatgcccggttcaagctcccggaagacgtgaaggaactttcctccaagcaactggaacatgtggtgaatgagtgcgaagcttacgagtggttcccggcatctgcagagaaggaggttcccgtgcctcccccggcggcgctgcctgctgtttccgtgcttcagggggattccgtggccgtgcagggaaaaggtttttccgcctccttcaaaaacgggatgctttcctccctccggtatggcggccgggatttgattttgcccggctatccggtggagctccaggcgtaccgttctccggtggataacgatgcctggatcaggagcaaggttgaagggaaaatgaagatgcagaatatgaaagcggaatattccgacgttaaagctgccgtcatttcccccggcgtggcccgaatcacggcacagttccggacgaaaggggccgagcttgccttttccggggaagtcgcgtggacggttttcggcaacggcattatcaatgcttccgtccgaatgtatccctccgccaagggagaagaactcctccggctgggcgtcactttcgggatgcctgccgcgtatgaccgggtagagtacctgggtctgggaccgtgggataattaccgggaccgccgcacgagctgctggaaggacattttccgcacttccgtggacgatatgttttttgcttattcccggccccaggatatgggcaaccgcatggaaacggactggatagccttatccaaaccccaggaggaccaggctctgtgggtgggggccgcctctcccagggctccgctggaggtttccgtcctgcgttatacgccgaaggagcttaacgatgccaggagcctggacaggctgccggagaaaaataaagtgattgtgaatctggatgctttccagatggggctgggcggctcttcctgcgggccccgtccgctggccaagtaccagacattgagcggggccacagccctggggtttgtgctggctccctcgtccgccctgctgaatctggcgcgcacggggctggccgttccccattcccctgtcattgaacgggatggggacggcatggtcagtctgacttcctctacgcccgaggcggagataaagtattccgtcaacaaggggccggaaaaaacgtaccggaatcccttcaagcttcccgaaggggaagtgagggcctgggctgcctccgtgaagtccggcaaggttccttcctcgtctcccggagagaggaaattccccctcgtcaaggggcagggcgaatggaaaattctaagcgcttcctcggaagagccggataccggtttcgcccattttgccattgacgggaatccggatacctattggcatacgtcctatacgaacggcctgccggggttcccccactccattgccgtggatatgggaaccagaatgaagtttaccggatttatctacacgcccagaatggacaaggacaagggcctcatcagccagtacacgttttccgtttccgatgacggtcggaattggagggaagtgaaaaaaggccagttctcctaccactatatccggaaggatccggctgttcagcgcatcgacttcggcaggcctgtggaggcccgctactttaagcttgacgcccggtctccggtgaggggcggggaacagagcgccaccgttgcggagctgaatatcattacccaataacggagcggcaggcgttttgcactgcttcccggatggagaagttttccagccgtgcgccctttccggggtgcacggcttgttgttgcgggcttttcagggtgcggaaatgtttttttaatgaaagaaagaacatggcggaatggtaacatacgcatgcgcaagatgatggcctgcatgctgggcgctgccctgtgtttttccatggccggagcggaaacaggcgtttcctctgcggaaaaagcttcacccctgttcgggaggatgatctggaatcgcggctgggagttccggcttgaggacgagcccggaaagagcggctggcagacggttcatctgccccatacgttcagtctgccctactttatgtccgattccttttacacggggttcggctcctaccgcaagaagcttatcatgccggaggaatggcaggggaagaaggtgtttctggattgcggcgcagctttccaggtggcggaggtgaaggtgaatgggaagactgcgggaaggcatgaaggggggtatacggccttccggtcggatttgacgcctttcctgaagcccggcgagaactgggtggaggtacgggtggataaccgctggagcccccgcattgcgccgcgggcgggggagcatactttttccggaggactgtaccggaacgtgcatctgcacgtgtgttctcccgtgtatttgcccgcgcacggagtatgggttcagacgccggaggtgacggcggcccgcgggaaggtccggattttgacggaagtgaagaatgataccgggacagtgaggaaagtgacggtgcggcatactgtgcgggaggagcaaagcggttgcgtggtgctgcggggagagaaggacgcggaactgggggccggggaagattctcgcgtacaggctgacctgcctcctctggcttctcccaggttgtggagccctgcggcccccaatatgtaccgtgtgacgacggaattgttggacgagaaggggaaggtgctggaccgggttgaaaatcccctgggtttccgtactctggagctgacggcggaccggggcatgttgattaacgggaaacctgtttatctgcagggggccaatgtgcaccaggaccacgccgggtggggggatgccgtgacggacgccggggcccgccgtgatgtacggctgatgaagaacgccgggtttaatttcatccgcggctcccattaccctcattcccaggcttttctggatgcttgcgaccgggagggcatgtgcatgctgaatgaaggcattttctggggaatgggcgggttcaaggagcatgacagatactggaattgcgatgcctatcctgcggaaaagaaggaccgtattgcgtttgaggaaagctgcatgcgccaggtgagggagatggtgcttcaattccgcaaccatccttccatcgtcatctggagcatcagtaatgaaccgttttttaccaggcatgcgccggaggccagggctttgtgcaacaggctcattaccttggtgaaggagttggacccgacgcgccccgtgtgcgccgggggcgggcagcgcggaaattttgacaagctgggggacatggccgcctttaacggggacggctcccatgtgaagacgcccggcaggcccagcatggtgacggagtatggttccgtgagctgccggaggccgggggcgtatgcgccgggctggggggatatgaagaaggataaggaagcggggattcgctatccctggcgcgtgggagaggctgtctggtgcggctttgaccacggcagcatctggccttccggagggcgcatgggcatcgtggattacttccgcattcccaagcgggcctggtactggtacaggaatgcgttgaggaatattcctcctccggagtggcctgtggaggggactccggcacaggtgaaattgtccgcggacaagaaggttatcagcccggcggacggcacggacgacgtgcatgtgaccgtgaaagtggcggacgccgccggaaggcagatatccaatgccgtgccggtgacgcttacggtggtatcgggtcccggggagttccccaccggcaaaaacattacgttcacgcccggaacggatattgatttgattgacggctgtgcggcgattgagttccggtcttattatgccgggaagacggtgatcagggcgtcttctcccggattgaagggggatagcctccaaatcgtttgccggaatgctccggcttacgtagcgggcaggagcgcggaaacgcgggaaaggccctacaagcgttttagcgcaaaggagagggatatccagctggcgcggtacggacggcccgaatccggagagaaagccaatttggctgtattgaggccctgttccgcttcctccggatttcaggaggcgatgaaggcttccgacggtgacgatgtttctgcatggcatccgtccgtggaagacaaagcgccgtggtggcagctggacatggagtttgaattccgcctggaccgggtggaggtgaaggccgccggaagctggaaggggccggctccctcggttcaggtcagcagggacggaaatagctggaaggacattaaagccgttttgcgcaaggatgggacggagctgaccgcaatgtgtccggaagggaccggcgccaggtacgtacgcatccatctgtctccggggcagggaattgcggaagtggtcgtatggccggcggatgcgtcatgaggggtcccgtttttccggaacaggaggctttttcctgttactgcgcgtaccggagtttccggcgtcctcttccgcccgctggcggcgcagtttgtcccaataggccaggcgtttgttgatttcccgttcaaaaccccgttccggcggcctgtagaactggcggcggggcatgttgtccggaaagtagttttgcccggagaaagcgtccggcgcgtcatgatcgtatgcgtaattctttccatagcccagttccttcattagtttggtgggcgcgttgaggatgtgtgccgggggcatcagggacccgtattcccgtgccgctttccgtgccgctccccacgcggtgtaggcactgttggatttgggggcgcagcccaggtagataatcagttcagcaatcgccagctctccttccggagagcccaggcgttcataggcgtcccacgcggcaatggccatttgaagtgcggcagggtccgccagactgatatcctccatggcgaagcgggtcaggcggcgcaggaggtagagaggatcctccccgccctcgagcatgcgtgcggcccagtacagggctgcgtccgtatccgacccccgcagggatttatgcagggcgctgatgagattgtaatggccttcccggtccttgtcgtaaaccggggctcgctgctggacaattttcagcagtgcgtccgtgcccagcatttcatcgggcttgcagaggtcaaagacgctttccatcaggttaatgaggtagcggccgtctccgtctgccagttctatcagggtggcgcgcgcttccggcgcgagcggcagttcacgctgaagaagggtttccgcccgttcaatgatgctttccagagccggggcgtccagggagtgcatgacgaagactttgcagcgggagaggagggcgctgttcagttcaaaggaggggttttccgtagtggcccccaccagcgtaacggttccgttttccacatatggcagaaaaccgtcctgctgggcgcggttgaaccgatgtatttcatccacgaacaggagggtcccatggccgtattccctgcgcctggccgcttcgtcaaaggcttttctcaaatccgccatgccggagaagacggcggagagagctgcgaaatgcatggatgtgcgcgtcgccagaatgcgcgccagcgtggttttcccgcagccgggcggcccccataggataaagctggtcatcttgccggagtccgccatgagccggagaggtcctccttcccccagcagatgatcctggcccatgatgtcttccagtgcggacggcctcaggcggtccgccagagggcgatccgccaaggcggagaacaggcccggtgcgtcgtcttttttcatgatgcccatcatacgccgccggtaaaaggaaggcaaggggagcctgctggcatttcaggcggcccggcacgacggcacttcgtggagaggatgttgcaccccggttttgacgggtggaagagaagctggggagaaaaggaaagattcctgggaaaaacagtgtatattgaacatgatgttcagacatgtttcccatgtgtttctttttctgttttccggcttatgcggcacggccgtgaatgctcaggatcagataataccccggcccgtgtccgtgaaggtggaggccaagggggcggcaacgcccgtgaagctggatgaaggaatgcgcattatatgcaaggagaaggacggggagttccggcgccaggctcacttgttgcagcagtttttgtcacgcggaaccggattggctctggacggggctggcggtacgggaataatccgcgttgtgaaggacgctgccctgaagcagtacgggccggaggcataccgtttggaagcggctcccggaaatatcgtcatcagcgccgcgacccccaaaggagtttattatgcggggcaaagtctggcgcagatgctgcctgccgcctttttcaacaatgatgcggacaaaaagagcgtaagttggaatgtggcggagaagcctttttccatattggattatccccgttttgcctggcgagccttcatgctggatgaagcacggcatttttttggagaggaggaggtgaagaggctgattgaccaaatggggctcctgaaaatgaatgtcctgcactggcatttgtcggatgatgccggatggcgcatccagattaaaaaatatcccaaactgacatccgtgggaggcaagaggagagatacggagatagagacgtggggaagcggcaagtatgaaggcaggccccatgaaggcttttatacgcaggaacaggtcaggcgcattgtccggtatgcggccgacaggaatataacgattgttcctgaaatagatattccgggccattccgccgccgccatcgtttcctatccggagttgaaattgtccgccaggcctctcgcggaagtgcccgtgagtttcaatgacggagcggcgtttgatcccaccagcgaacgtacctaccagttcctgggagacatcatgacagagctggcttccctctttcccggaggtatcattcacatcggcggtgacgaggtgcggtacaaaaagtactgggaaggcgtgccccacattgaggcgttcatgaagaaaaaaggcattaagacttttcccgaccttcaaatcatgtttacgaatcggatttccggcatgctggctgggatggggcgccggatgatggggtggaatgaaatactggggtccgacgtgcacaatgacggcggccggggagctgcgctcggcaagctggatgcaaatgctatcattcatttctggtatgggtccgataaaattgccgccaaggcgatcagggaaggccgccaggtggtgaattccacttcccacatgacttacattaacaaaggatatgacaagctccctctgtccaggtcctattcttttgagcccgtttttgcaggattgaacccggagcagcagaagaatgtcatcgggctgggctgccaggtctggacggaatggattgcggacgtggagaaactgcaccgtcatgtatttccccgtattgccgcttatgcggagacggggtggacccggaaggaggataagaattttcaggatttccagaggcgtttgacggggtatgaaaaaattttggatgcccagggcatccggcacggtgaaaaggagtagttgaaaaattcgccgccggggatgaagcgtcctggctgagtcaacagtaaacccgcttgttacttggttaaggattcgggagagttcctgtcaatggcttctttgaggcgttccgcccgctcctgcatgttttccagaattttcagaatataagaacgcgttgtagccgagtgttccgctccgcgtacgaaggaaagcccccggtacagtcctaccgtttccaggcggagattcatatcttctccggacaggtcttcactggagggaggaggataattggaagcggggccgttcagggacttcatctgcatggtatccatattaagcaggcagctttgtattccgttagtgaaaatcaggctgccctgatgatgcttgtcctccggccacagcctgtaaatggtaacggcgcttctccccccgggattgatcaaaatggcggggaaaacgtgtttgccgccaccctttttccggacggtcgcgtcaaaatcgcattctccggaaaacctggtcgtgacacgggaggagatgcatacttcaaaaggtacttccggcggcaggggaatcatggtggcggcagacaggggtgaccccggagggagttccggaatcgggaaggggagcgtaatgatgtcaatggcgcagctgatgatgccgatgatggcgaatagcaggatgcctttgttccggagctgggctgacatcatttttccatattcctccggataatgcctgcctgcggatggttcctgctgcaggtaatagccggtcaggcgtgaaataacggccagagcggcagccatggctgccagccaagccagggcaaaagccagattttccgctatgggaattgtggtgaaaaagccgaatgttccaataatgaccgccgtcagcaggagaaagacggccaggaaggttatgcaacctaaaggggccgtggagacgggaatccagaaactgctgcgtttgccgagggctctcagaatcaggatggcaatgcaaaaagagaagatggccagcgttgaataaaaatgttgaaacagataatcgagcatggcatgcgggaaaaacttggataggcaagcggggagcgattccatgccggtttcctgaaaaatatccggaagcaagcagttttgcgccgcgaaacgatagaagccgaatgttgaactcctttattattttagcctttttccatccttgcctgcaagattttttgtttacctgtttcttcctatttgtttttgatatgtttgaaaaacattgtcccataagaaaatatgggaaaaaaccaactccattttcattcagtgaaaaagatgcggttttctataaacggaggattccaaaatggtaaaactgtgtgttatggataagggaaaaagagtattcctgccatggaaatgttttttcccgtttatgaatgaaaccgctgcgccggttttcccttcatccttttcaagataccgggcggggagaagagccccagccggatgtttacctgcaagagcgtggggcagacagctccggccgggttgatgaggaaaaacgcttccctgaagaaactgctaccgctgttccggctttgccggcactttcctgagtttcgcgaagcggggcagggaacattccttttgcatggccgtttctccctggatcaggggaagaacgtaatcaatgaacggctgttccacgccattgccgcgggcgttgatccattcgcggggaacaagtttttccacattggccacttcttccagacctatcaatttagtcttgcaggaataaatgccgttctccgtgattcgttcaaaggctaccattttatccgtctggccggaaacggcggcttccacggcggcttttcccgccatatacgcttcatcgatatccgtcttggaagcgacatgggaggcgcagcgctggaggagtgagagttcaatgcttctgactttagccccggtttgccgcttgacggattccgcaagcatggctcccaggcctcccagctgcgtatggccgaagacgtccctgtctccggattccgcaacaaagcggccgtctgcatactgcacgccttccgagacggcgaccatgcagctgccgttctgcctgtaaatccggtccacatcctgccagaattcctccatgcggaagggaacttccggcaggtaaaccaagtccggacctgctcccgcatacgtggccagggctgcggatccggccagccagccggcgtggcggcccatgatttccacaatggtgacgcgtcccttgtcgtacacgcggaggtcctggtgaacttccatgcaggaggtagcgataaatttggcggcagagccgaaaccggggcagtggtccgtgccgtgaaggtcattgtcaatggtcttggggattccgatgacgcggcattcgtaaccggactgctgcatgaatttggatatcttgttgcaggtatccatggaatcgttgcctccgttgtagaaaaagtagcgtacgtcgtattttcggaaaatttccagcagacggcggtaatccgtatcatccacggacggggcggccatcttgtagcggcaggaacccagggcagatgccggggtatatttgagcaattccaattctccggggtcttcccgggccatatcgaacaggcgttctttgagcactccctcaatcccgttggcggctcccagcacgcgtgtgacctgttcgctttgcagggcggactgaatggctcccagtgcgctggcgttgatgacggcggtggggccaccggactggccgatgatgcatgctcctttcaatgggttcatgggcaataatggatgagagagttgtgttgcgtcccctttcaacggagttggaggcagggaatgaaatgatagtcaaccctatccgcagcccggagggatgtcaaacattattggttttccggatggggctggagaaagtggggaagaaaaaagagcaggggtgtcagtttttttgtctccagagcttttccaatgcggaggcaaagcgttctcccaggactagaactccatgcgtgcccagatggacggtatccgtgggatagggggtgcggaagtccatgctgcgcagctggagatcgtctgcggggacatagagcgcattgttgacagagaaggaggtccgggattcttccgccacatccttttgcccctgccgcactttttccctgcccggaaaacgggccggagcgggcacgggaagaacgctgccgtagataaaggccagaccgggggcttccagatccgctctgatgcgtttaatcaggttgttcaggttggcgccgtaagacagagcgtttttgatgccggcaatgtcccttgcgtctccttccccctgttgccacaccatggctttcaggacaagagcatgtccctgctttttcagggcttccattccgttgcggacggtacggagcaatttgacgtattcttccccctgcttatcctgagaagtttttcctgggttccattgccggaaaaggttgcttccgctccgggcgtgcttgatgatgacccattttttttgcgggaattttttctgcaacgctgttcccaggcttagttccacgccaaaacggtcgggggattcggatgccgggctcaagggaacaagctgttctgccggttctgtccctttgagggagacggaatagtacagaagaacccgtttatccgttttgaagcagggaggaatgttgttgacgtacccttgccctgtggcgtttgactgtccgccgataaggatgacgttgacttcatccgcatacaggggtggtgccggaaagaccgtcagggagcaaagcagccatgaaaagaggaaaaaacgtgcagagcgtggaagtacggaaacaatcatggcggggatatccctgatacgtttccggaaagaagattctgtcttctggaggaattcttctttgcctgctgccaggatatttgactgttgatgttttcctgttcccttgattctttcctttccggaaaaaggcattatgcggaaggtgcgtgcagggaaacggattggccggggtatatttccggaatgacggaaatgctcttgatatttttcccggctgtcagggagcggagcatccgtatgagcttgtgaaccgtttttgtctggttctcttcataataggtgatcgtgggcagcaggcgttccatgaagggttcatacgtcaggctgaccaggctgagctgatccggaatgctcagcgaacgggcttccacccaggaaaggatgggaacgatctggttgccccgtgtggctaccagggcggacatatccggatgttctttaaacgctttggccaggtattcaaagaagagcggcgtttcaaacggggtgggaaccaggatgggattccatccctgttccgcaaagctgaaaaaacctttttgcatgagctggtggcccttcaacggatcaggaggcaggcacaggcctaccgttcggtgccccttgttccaaaggtgctgcgccgcatgatgcgtggtggccgcccagtggcggtccagatagggaaggttgctgctctggtaggaggtgccgcgcacaatgcaggggatgcggtgcgtcttgaaccagagctgggtttgctccgaggaacggtgaagtatccagcagacgcattcggatttggtaaccagcttggcaagcctcttgtccgggttattgcctaagatccagggagcttcaaagatacggacgctgatgccgtcttcctccagaattttggagatggtatatatctccgccaatacgctttgagccagccttttgaggggttggggcgtcagaaatccgagaatttcttttttttcctgaaccggatggcagaagatatttttaaccgtttcttcttccgtagttttcaggatgcgcctcggaaccttgatgcgtgggggggcaatccatgcatccctttccagaagggccaaagcctttctgatggtttccctgcctacggataacctgtgcccgagttctctttctccgggcaggatattgaccaggctgccgctgagaatcatctgtttgattttattggctactgtttcaaccaatgaagaagctggcaacgaagtcatactcttgtatatacgtatcgcattgcgtgaattcgagccaattgtagggattgcctgccccgctgaatccgaaaggagagctggtgttgttgcaagttgttgatattctgtaaatcgttttaggatttaagctactggtcttttttgatgaggtaaagtgggcggataatgtataaatgatatagtgttatcaatgcattacattcctgagcggtacggttgcaggtggtttgtgattattttttaattcatttaagataaatattttattgcgtattttgttaggcaggtccatttattattctcactttaccccatatttccgtcaggaaatatgcacgtatcggcatggatgacttttcttccgtttccggcactaaatctgcttgatgaaagtgaataccataccgggcgcatcctatgcgctgacttgtacggctgcgtgtactatccatgcgcttcttagcgacgcttcttccctggttatcctggaaacggaaaactccggacaatatttttttatagctcccactgatacaatagaggtatcagacgaacacgccctggtgacacaaacttttaaagcagccgctccgggatcgtctgcccgcagcggcataaggccgggagtaaatgccgatttaaaaaatccgacggtggaaaaagcggtatgaaccatttcttttttctgatcgcccgcgattaagcgcagcgctcatgagcaatccggtcaaaaggctgttcgcccatggtttttcgaacctttacggggagcgggacttcaccgccagatcattgtctggcgcggactgggtgcggaagtccgtctcattccgtcctggaattgctatggggaagtctctttaagaaatgaagcgttatcgactggtaatagaaaaccctgggagcgtttagctaccagggtttattgattggtaccgccggtgggactcgaacccacactcttttggaactcgattttgagtcgagcgcgtctaccattccgccacgacggcacgtgaagcgaaagaattaagaggcaagagagccggagagtcaagaatttcctgtggaatatggtgagctgctgaaaaaacggagggattttcctgcggattccctccgtcatgtttccggatggaaataagtgttaggaatgagcagtgcacggccgcgttaacgcttttttgcgtcccttctcacgccgccaattcccaaaatgctcgcacctcgcatcctcgaatcccctgcgtatgcacatagcgcgtctgcaacagcgtcccgtcccgatgccccatcgccgcctgcaaacgcccccaatcgtgaaacatcttcgcatgatacgacgcaaaggtatgccgcaggacgtcctgacgccatgtctgaaaacccgctgccgagcgcaaagcgcgccaccgcctgttccaatctggcggacagatgaaaaccgactccctctctgccccctgcggataataactcctcaaccatgccaacacggagcgagacagcggcacctgccgaccgccgcccgtcttgctctgcctcgggcgaatccgcacctccccctcctcccaatccacatcgccccaggtcaaacgccgcacctcatacggacgaatcccgccgtaaagcatcatcgccacgcccgccgcacagggggaaaactcctccctctctgccgtccgcagcaggcggcgcacttcctcgatacggagggggacgatctcccgctccgtcacgcgcggcacatccaccagccgcacgggattatgcgcacaccagcctttcttccacgccaccgtgaacactcccgagagaatcgcccgcgcatgacgacgttgcgagggtgaaagaaagactttctccaacacagccgcacagtccgccgtcgtcatcgagcgcatgggacgcgccgccagatcgggcacatctcgcatcatcctctgcgtgaaggagcggatatcgcgcagggtgagcgccgaacggtcggccttgacgcgcagggtttctgccacggctttggagaaggagaccgtttgcgtggcgagatgctcggcttcgcaccccaaggcgatgacgcggcggcagtgaaggagcagagcttctttctttcttacggaagagcctccgcttccttcgaccagctccagcatgagacgagcaacatcggtgagggagaaggggagagaggcgaggagggcaagggcggtgctagcgtcggtgttcatggcaacaggataaataatgctcttaacttcaatgttttgattctcaatatattatattattgagccagacaaagaaacaagaaaaaaaggaagaaaaattcttctcatttttttcttgtcatacaggcataactaccgttccattccatgtttttgacaagtttcgttattttgggcttgatgaagagtattatttatactctacttccctcgatgaaacatcgagggaatgaggcttcgggagagacgcaactcgatgcctcccttgtggctattctcctcgccgaccgttcgagcggcgctttcatccgctgggcctgcaacgcctacactacccacggcgagtcctatgcggcggatcaagagatctacccccatcaggtgcatctgattcaggagcgcacccgcaagacgcaggaagaacagcgcgaccgcaccaaaaaatccgccgaagtctttacccctgcttggctgtgcaacgccatgatcaacgcccgcgatgccgtttacttcgggcgggaggaggtctttaaccgtatggaggctccatcgtggacgccgacgcgcaagacgattgactttccgacgacagcatctggccgccgtctcgcgtgggagcgttatatcgatgcccgctgtctggaaatcacctgcggcgaagccccctttctcgtctcgcgctacgatgccgccgacggtcgccccatccccttggcggagcgcatcggcatcctcgaccgcaagttgcgtatcatcggcgagcatacctgcaccgcagaggactggtttcactgggcaaaacgcgccctcgaaagcgcctacgcttacgaataccagggcgacagcctctttctcgcccgtctcaatctttttctgagcattagcgagtaccaccgtcacctgtggaaacgccccctcaaccgacaccaacaagaggaagttgcccgcatcctctcgtggaatctctggcagatggacggcctgacggcgacgactccctttgccacggaacaggggaagcccgaggattccttatttgatttttacgccatcacagccgaaaggcgccccctccgtagcctcatccgcgactggcgcggcaaaaaaacgattcgattctctgaactcaacctatccaccaccatgaaatttgattttgtcatcggcaatccgccgtatcagctggaaaccgccaataaatccctttccaacggacaattgccaagtaaaagcatttttcatcattttcagctgagcgcggatcagatttcctccggtcttaccgtcttgatttatcctggagggcgatggattcagcgttccggaaaaggaatggcggatttcggcttacaacaaatcaatgacagccgtttacaaaccttgtattattaccccgacagtaccgatctcttccctgcacaagttgccgaaattgcggacggcatctccattgtggtcaaaaatgcccacaagacgaccccaagcttccgctacttctatatgcggcgcggagaaaaaacaggtgtcgagctggagcctcccggcgaaaatatccttcctctagacccacgcgacggagccgttgtcaggaaaatcgaggattttgttcaaagaaacaagttgccttatttgaacgataatgtgcactcaagaaatctatttggaattgagagtaattttgtcgaaaaaaatcgagatcaggttcgcctctatcaagaaggggatgcggtagattgcgagacggagatcaagctatatgctaatgaccgagccgggaaagctggcagaacgacatggtttgttgcaccaagaagcattattcagacgaatgaggcttacatctccaaatggaaggttgttgtttccagtgcaaacgccgggggacaaaagagagattggcagttggaaatcatcgacaatcaatcggcattcggtcgttcgagggttgctctttcttcttttgaaacgaagcaggaagcggagaatttttaccactatgtgaagagctatattattcgctatgccttcctgatgacggatgaagctctgacaactttggcgctgaaagtgccggatatgtcagattatacttctgacaacaagttaatcgactggtcgcaggatattgatagtcagttgcagaagctcatgtccctcagtgatactgagtttgaatacatcaaaaacacggtgcagagtgtacgagcctaaaaggagaatccatccatgaacaccatcaacatccgaagcacgaagaaggttgagccgaagtgttacgcctacacgactccagaggtgcagcggcacgagggctggacgaagattggctacaccgagcaggatgatgtcgaggtgcgcatccgccagcagacgcagacggtggatgtgcgctattgcctggaatggcacgagtcggcgcgttttgccgacgggacggtgtttcacgataaggcgtttcatcgttacttgggcaagaaggaggtggaacgcgaggggaattcggagtggtttcatcttgtgcccgaggtggcgcatggtcattttcgggagtttacccgcaatcgcggggtgttgcagacgccgggtgcggtgccttatgtgttgcgggcggagcaggcggaggcggtcgagcggacgcggctctatatggcgagccacgcggggcaaagcccggagtttttgtggaatgccaagccgcgtttcggcaagactttggcggcgtatgatttgtgcaagcagatgggtgcgcggacggtgttgattgtgacgaatcgtccggcgattgctcattcgtggtacgatgattatgtgcgttttatggggacggagtcggggtattatttcatcagtggggcggatgctctgcggggcttgccccatgtgctggagcgcgcgcagttgccgagtgatgccgaggggtatatcgagtttgtgtctctgcaggatttgaagggttctctgtatttcggcggggagttcgataagttggagcatgtgcaaaagttgacctgggatctgctgattgtggatgaggcgcacgagggggtggatacgtacagggcggatgtggcgttcgagcagattgcgcgtcgggcgacgctgcatctgtcggggacgccttttaaggctttggcaaatgaaaagttcgaggagaaggcgattttcaactggacctatgccgatgaacagcgcgccaagagggagtggcaggaggaggcggaggaggaaaatccctatgccgccttgccgcagttgcacctttatacgtaccggatgtctgaggtagtgcgcgatcgcctgaagcagggggctgattttgacgatgacggcgaaaatgaggcctatgcttttgacttgaatgagttttttgccacgaagagtgacggttcgtttaagtacgatgaggcggtggagaggtttttggaggctttggcagggcaggagaagtttcccttttcgacggaggctttgcgccgcgaggtgaagcatagtttctggctgttggaccgcgtggacagcgccaaggcgttggcgaagaagttgaaggcgcatcccgtcttccgcgagtacgaggtggtggtggcggctggcgatggcaagacggatgcggaggaggaggcgacatcgacgctcaagtccttggataaggtgcgcacggcgattcgtgcccacgagaggacgattacgctttccgtcgggcagttgacgacgggggtgacggtgccggagtggacggcggtcttgatgctgagcaatgtgaagagtccgtcgctgtatatgcaggcggcgttccgggcgcagaatccctgcctgttcgtggagggggacgagttgcggcgcaaggagaatgcgtatgtgtttgattttgaaccggcgcggacgctggtgatttttgagcagttcgccaatgacctgtgttcggcgacggtgagtggcggaggcgatggggagacgcgcaaaaggcaggtgcgcgagttgctgaattttttccccgtctatggggaggatgaggagggggagatggtggctctggatgcggagaaggtgttgtccgtgccgcgcaagattcatgccgtcgaggtggtgcgccgtgggttcatgagcaatttcctgttccagaatatcgggaatattttctcggcgccgcgtcaggtggcggatatcctcgggcaactgccgacggtgaaggagcagaagccgtccaaggcgaaggagggcggtcaggaagagggcggtttgttggacggcgccgcggatttgcccctgaatgaaaagggtgaagtggtgttgcccttggatgaattgacccgtaagacaggggagcttttcggggataagatatacagcgacaatgttgtgacgcaaacgaagatcgatgaggtctcgacgagtaacgcgccggataagaaggccgcacaaaatttagtgacgatattggtggatactgtggtgaaccccaccctgcaggatgccaagacgcactatggcgatgagatgagtagagcgtctgaacatcgtctcaaaaagcagttgcagaatcaggcgacggtcgcggtcggcaaggcagcgacgacgcacaagaagaatcgccacgagacggagaaggcaaagaaaagggctctcgacgaggcgcatgccaaggggcagagtgaggccgaggttcaggcgattcaggatcgttttgatgccgagcagagggagaatgagcgtcggtatcgagaggagttgaaggaggcagcggcagagattgagaagaaggccaaacaggctgtggtggatacggtggaaaccgagaaggttaccaggaagaaggaggcgattgaagaggatattcgcggtcatttgcgtggctttgcgcggacgatccccgcctttttgatggcgtatggcgacgagaatacctgtctggataatttcgatacgattcttcccgatgaggtctttagagaggtaacggggatttctttagagcagttccgcatcttgcgcgatgggtgcgattacgaagatgagggtgtccggaagcattttgacggtcattgttttgatccgattgtttttgatgatgccgttcaggagttcttggcgttgaagaagaaattaggcaattattttgatgagtcgcagtcggaggatattttcgattatattccaccgcaaaagacgaatcagattttcacgcccaagcatcttgtcatgaagatggtcgatatgttggaggaggagtctccgggctgtttcgatgaccccgacaagacgtttatcgacctctacatgaagtcgggtctatatgtggcggagattgtcaaacgccttttccgcagcgaggcgatgaaggcgcgtttcccgcaggcggaggagcgtttacggcatattttcgcgcatcaggtgtatggcttggcgccgacggagattatttaccgcattgcctgtgcctttgtcctgggcttcgacgaggagctgcgcatcgagcggcatcatctcgcgcgcttcgatgccttgccggcggtcaaagacggcacgctggaggaggctctggacaagatttgggagaggtgaccgtgatgacggcctggcttgggaggcttcatgtcttgcgccgctcccgttgaatgagtggcgcggcttaatttccggcatgtttctttgtgtttcatgtgcgcaagccgatgaaaattcatggttggcgtttcagccttttttcacggtcaggggcagtcccgccaccatgaagtagacttcatccgcgcttttggcaaggagttggttggcaatgcccagcccgtcgcagtagtggcgcgtttccgcatctgactggctgatgcccatgccggtttcagaagaaacaagcacccatggcacgggggattggcggatgagctttttcaaagcttctatttcctcaatcagcgcttcctggaacggctcgtaatccgtggggtccttctgggcgtacagggtattggaggcgagcagggtgacgcattccagaatgacgccgtccacttggtccagcaagccggattccccgacggcagaagctacatgacggggacattccagcgtgagccagcttttaggacggcgttcctggtgcttgcgcacgcggtattccatggagccggctccgggccagacttccgccgtggcgacgtacaggattttttccccgaatccggcggctatttgttcagcgtattggcttttgccgcttctgatgccgcccaggacgagcgtcatgcgtgcggtattggcgtcagtgtttggtgatgtagcgttcatgggattccagcatggcctggtgggagttcaggaagtcatccaggctgaagacttccagcgtaataaggggggagaaatgaaggtcccacatggggtgcagaatggcgtccagcgtagcggcaggcatgtggtgcagggatttgtggtcccgtttttccagcccgtgcaggtggcacatgcgtatgtccggcagccagagcggcagaagtttttccggccgcaggccttctttccagacatggcctatgtcaaagcaacgtgaatggggtgtagcgtctaccagtttgtccagatagtcggtcggatggcgttccaaattttccagggccaggcattccgatgcggggaggtggggcgtgatttgttccagactccggaggattcgttccgtttcgcgttccgtaagatgggggcgcatatcaggaccggggatatggtccgtgaccacatgcatgacccaggtgtggggctccagttcccgtgtcaggtcaatggcgcgaatgatgttttccgtataacggcggcttgattcttccgtggcgaagctgccgtccgtaggcaggtggacgttccaggtaaccccggcatctgcagcgattccggccagttcccgtatttccgcaggggtaatgagttcctttccgcattctccggcttccagcaggagcagagcgacatcatccgcgtaatggacgcattccctgatggcgggcacgtagtagtccgggatgatgaaggaggtgcatccgatgttgaggcctggaacgcggcatttgtgtggagttttcataaagtgcagaaggtgagcaggacaagccattccgtacattccacggtacagccgaatacatccccggtaacgccgcccaggcggcggcgcgcgtatagaagcaggcccatggagccggccagggcggagagcagggcgtacagcccgttccatcctgccagagcgcaggcagccagggtgacggctgcggcagccagggcgtgcccggggcgcgttccctgcttgaacgcttcccccatgcctccaggccgtgcgcccggaaagcgcatggcgatgaatatctggctgcgggcaagcaatcctgccagagcgcacgccgtgagcagaagttcccaggagccgtgggccgccagagtcgccagggcggctcccttgaacgccaggttgaaaaacagggccgtgccgccgaaggtccccaggcgggagtctttcatgatttccagcctgcgttcccgggatacttcaatgggaagcccgtctccgcagtccgctactccgtccaggtgcaggccgcctgtgacggctacccagcaggcacagccgataacgccgcagaccaggggggggaagagcagggttgccgtccaggtcaggccacccgcaagcccccccaccaccaggccaaccagcggtagccaggcggaaattccgttcaggtcattttgcagcggccacggccctacgggcagccgggtcaggaagccgaaggcggagcggatggtggtgatgacagccatggatacagggaagaaagggtcagcgcggaacggtgatgtccagttccggcagggttttcatttcagaaagtacgcgcgtggcggcgtccagcaggggaaagaacagggccgcccccgtgccttcccccaggcagaggcccaggtccatgtacatggtgacgccgatgtggtccataatgagcttatgccccggttccgcggagttgtgggagccgatgaagtattgcgccgcttcctggcgaatgccctgggcgatggccgcggccgccccggcaatgaagccgtcaatgacgatgggaacgcgcagggaggccgcccccagcatcagtccggccatggctcctatttccggtcctcccaccttcgccagcacgtcaatggcatcggaagggtctggcttgttcagggcgattccctgttcgatgagttttatttttttgcggatgacttctcctctgacgccggaaccgcgtcccgtcacggtttccacaggggtgcccgtgagcacggccacgatggcggaagagggggtggtgttgccaatgcccatttctccggcagccacaatgtccagccctttgtttttttcttcacgggccatgtcaatgcccacttgcaggcattcctgggcctgttcccgcgtcatggccggccccttgctgaagtcgttggcgccgtgcatgacttttcttttgaccagccccggcaggtcgccgaagtcgtaattgacgcccacgtccactacggaaaggcgtgctcccgcgttgcgtgtaaaggcgttgatcgtgcctccgccctgaaggaagttgcgggtctggatgtaggtgacgtccgtggatgtcaggctgaggccgtggtcggcgatgtggtggtccgcggcgaacaggactatggctttgtccttcaggcgcggcgcgggattgccggtcatggcggcaatacggatggctacgggttccagttttcccagggcaaggggaggcttggccagaattttctgatgttccagggccgcttttgcggcctgttcgtccaacggggggatatgcagtttgttcatgatgtccagaggcggggggtgaagagaagaaggagagtgaacgccagcgtacccgtggcggcagtcgtccacatgagccgaatggccagggccaggtcgctggcggaggctttggttcgccctgttcctatccaggggtagtttgcaggaattcccttgtaagagaccgggcccccgagacggaggcccagcgctccagcgaaggccgcttcgctccatgcggaattggggctggcgtgggcgttccggaaggcccatcccatggtgagcgccctccgggcggaggttcctttcaccatcagggcggaaaaggaaatacacggtaaaataaggcgtgcggggatgaagttgagcgcgtcatccgtgcgtgcggcaaaggtgccgaagtgtctgtaccggtcattttttttcccccacatggcatccaggatgttgaaaacacgatgcgccagcgcggcggaagccgccccggaggcgcctcctgccaggcagcctgctgaggcccagaacagggtggaaaaaacgccatccgtcaagttctccgccacgctttcaatggccgctctggcgatgccgtagacgtccatccgttccgtatcccgtcccacgatcatggagacggagtgccgggcctctccggcgttcccgctgcgcagggcgttttccaccttccgggcatgctcggccaggctgcgcggggccatgcagatgtaaataaccagaacggacggaatccagggtgcccagggggagggtaacagggaaaagggaaggaagagcgccgcgcagccgaaccatgcggcagtgcaggttgccagcgcggccgccattcccgcatgaaaagttcctccccacctttgcctcgccagtgtttccatgcggagcgcgcaccggccaatcagacagacgggatggaacctgttgggcggttctcccgccagaatatccagcaggaaggccgcaggcaggatgaatgggcacgggaacatgggtcagcgtttcagttggagagctcggtaaatggttttcaggtccagatgtttccggaccacgtccgccagacggtccagcgctccgtccaggtcataggcggtgtgcagggctgggttggctttcagccctgaatctttcctgaccatgttgatgaatgctcggcggaattggtctccgtccagcatgccgtgcagatacgtggcccagatacggcctttgccgtagccgcagggggagccgtcttcccggaacatgacgggggggctggattcttgatggctggtgacgccatggtggatttcataacctgcggcgggaacgggcagcggcgtgtttgcccggcgtacgttgatcagggttttggctgaggagaaggtggtggaaagttccagcagccctagtcctggcgtgcgctcctccggggattccatgtgcagcgggtccagaatgtccgtccccagcatttgcagccctccgcagacgcccagaagccactttcccttttcggcatgacggcggatgggttcttccagcccggcggaacggagagaggccaggtccgcagccacgcttttagtgccgggcagaatgaccaggtccggatttccccattcctcccgtgtccgcacctggcggagccggacgtccggctccgccgccagaggggcgaagtccgtgaagttggagacgtgggcgggcatgactacggccacatccaggcaatccgcatgtttcccgtgctccccgtggccagggggcagcgtggcgcggtcttcttccggaatgttgatgtcccgcatcatcgggatgacgcccagcacaggcttgcccgtacggttccgcatgtagctgtgcgccggggccagcagatccggatctcctcgaaatttgttgaccacgaaccccgccagcagttctttttcccacggggcgaatgtcatccacgttcccagaaaggaggcgtacactccgccacggtcaatgtccccggcgagcaggactctggcacgcgcgtagcgggccatgttcatgttgaccacgtctgctgatttcagattgatttctccggggcttccggccccttccaggcagaggagttcatattcgtccgctagggaatcgtatgctttgcatacgtccggccagaagcgccttttagccgtgaagtattcccgcgcgtccatgcggcctacggggcgccccatcacgatcacctgggagccggtattggaatggggcttgagaagaatggggttcattctggcatccggatcaatgcggcaggcctgggcctgcaccagctgggcgcggcccatttcctctcccagcgcagttacgccggagttgagagccatgttctgcgccttgaacggcgccacgtgatagccgtcctgaaggaaaatgcggcacagggctgccgtgagaacgctttttcctgcatcggagcaggtgccctgaatcatcagggccggtttgggagccttacggataatggaggggccgtttcccgccagttcggcgcgcagagcttccgccagcagggcgtgttcctccggcgtgcggacgccggagcgcaaccagccgcccgtttccagccccggataattggaacagtcgcgcagtgcgatgccgtatttttttaggagccgggctgccaggccatgaggcgcccccgccaggcggaagagcaggaagttggcctcggacgggagtacggctgcgcccggcagggaggagagcctgcggaacaggtcgtcccggcgttcccggttccgggcgcgttccctgtctgcccaggaggagggctgtgccagcacggccttcaccgctgccgccgcaaaggcattcacgttccaggcgggcagggattgccgcagccgctccgcgagcggagcggcacagatggaaaaaccgcaccggacgccggccatgccgtgtaatttggtcagggagcgcagaaccaccaggttgggaaggagggccgcttcacggagcagtgattccgctccttgtgcgtaatccatgaaagattcgtcaatgatccagaggacttcggggcggctctggacaaccctgtgcagggccgctgcgtccagcaggccgccggacggattgctgggatttgccagaaaaacagcgcttccgtctgcggcctgttcctccagacggcaaagagacgggaggaaggaatttcgttcctccgtccggatggaaagaacatccgtgccgtggcgcaggcaggccagcctgtattcggaaaaagcgggttccggaatgacggcctgtttaaggtttaatgcgcgcggaagagcgtgaatgagttcattggccccgtttccaaatacgaagcagccggaaggaagtccgtaatgaaccgccgccagttctcgcagatccgccgcatccggagaagggtagggtactgcgttttccatggccttccacaatgccgaagcgatgaactccggcatgccttccggcctcaggttgacgctgaagtccaaaatatcccgttccgggcggcaggcctcctccgccagggattttaaatctccgccatgtgaaaaaacgttcatgccacagtaattggacccggcgtaccgaaaggctgcccgcgccggagaaagaaaggaagcgccttgcaagttcggaattccacgtagccggaagcttcgccggagacgggaaatcttccctgttgcgggaacgtgggaacaaggagcgtcatgagcgcatcatgtcctgtatgcgccgggagtgacaagacaaaaatggaaagccccgtgaggaaaagagggatggagagcaatgcgctgaaaagggaaaacggctgcaattcatctggatgttcaaagaaaaatttttttgtcttgtcataccggtctctttggtatttcatccgtcccatgaacccttatgggaagggttacagacctcagggacgcccgtagccgggcaggaaataaatggggaataccggtgtgagtccggagcggtaccgccactgtaagcgagcctgcctcgcaagccagaaaaccagcctgtgaggttgtccaactgttcggcgagttaccgaacgtaaggcactacaaccatgctttatacgaagaaagcccttcaaatgggcgcaattgctgttggccttgccgcattcgcaggccagtcctctcttgccgagtccgctaaaaaggaagactccaagccctccgtcaggacggaaaccatgcaggttatgccggaactgaccatggcgtcccactttgtgggcgtgccgtacaaccgttctggagtgtccgtttccatcatcaatccggaagaattccagaaggcgggcattgaaaccctgacgggagccctttcccagacgcccggcgttttcacgctggacggaggcggcacctggcagcgcggttccgtgagcaacaccgtcatccgcgggatgaacaaggatacctacaccctgaccatggttgacggcatgcgcatcagtgatgccaacatgtccggcaacaagctgctgggcatcaccaatctctttacggtgggcaatgtggaagttgtgaaaggagcgcagggcgccgttttcggttccggcgccattggaggcgttgtcgcgatggatactccggagggggaaggcgatcccgtaaccaggatttttgcggaggccggttccttcggctctttcaacagctatgtcacttcctccggcaagatcaagaagctttcctattttgtaggtgttgggtttgaaactacggaaaacgatccgtcaatctatccggccatttatgacaacaggacaggcatgaacgatttccgccagtggcaggaagccgtgcgcctgggctatgacatcaatgacaaggtgaaggtgagctttacctatcgccgcctggattcctactttgaatatcccacgccgtatgtggattataaccagtggccttccgttccggatccccatctctacaatacggaagacaagaaccgcagcaacctggtgacaggacgtgtggatgcggaaatttccaagctgtggtccaccagcttcatggtggggcattacaacatggactattcctgccatactcccggatttgacttccagcccaacgtgatgcgcaaccgccgcttccaggcggagtggcgcaatgccctgacgtggaacaaggaatggaaaaccatcgccggcatggcctgggaccgttccgactacatgagcgaaaacaattacgttgccaaggatgaatggcagagcacgcttgccttctttgcggagcaaatgtggtcacccacggacagctttgacgccagcgtggccctgcgcctggaacatgattccgtctggaacaatcattttacgtggcgttattccaattcctggaaagtgacgggcaaggattcccccacccgtattttcggttccgtagggtccggtttccgcgcgcccacctggtttgagcagtatgcggccaattacggttatgtaggcaaccctgatctggatgtgtccaagtccctgggcggcgacctgggtgtggaacagcgcctggcggacggccattatgcttccgtgacgggcttctggacccgcattaacgatgaaatcggcaccaagagcgtaggcacctggccgaactcctataccacttacgccaattattcccactgtacttcctacggtgtggaagtggcgttcaagggtcagttcaaggacgcgtggaacagcggctattatgccaattacaccttcacgatgcccaagcgcgattccatcggcaaatacgagaccattcagatggccaataccgcccgccacaccgtcaacgcagaggtttatacctccccggttgaaaagctgacggtcggcttcggcgtaacggccgccatgggacgcacggactacaactatgcccgtctggacaatttctttacggcgcgcctgtttgcccgttaccaggcaacggacaatgtgtcccttcatgtgcgtctggaaaacctgtttgaccagaagttcatcatgacgaatgattataacttcggtccgcgtgaagcccgtggattcggaatcttcggcggtgtgacggtcgaattctaagttcctttcaatattaattgttgattgctcccccatcttccgccttgcggactgtttcaggcgaagtgaacggttccgcgcggaagatgggttttctgttttccgttgtttccggaatcggttaacatgtggcggccatctgagttgtgttgcgctggatatccatactgggggcattggccctttccgtctttctgggaggtgtcttttacttttcccagcgtgaaaagaatgtgtggcatgaattttccggacggatggacggcagggggatgcctgccgtatttgacggttttgtggaacgctggaacagggccgtggaacgggaactgcgccgtgaattggctgaaggggagaggaaggaaaaacttctggtcgtttcccgcggggcaggggacggccggcgtttggcggaacaggctcgttccgtggagcgcatcaggaaaaggctgttattgaaagaccatatccgccttcttcctttggaagacgttccggacggattggaatggcaaaccggaatggaagagccggatgtgggtgatccgcgcgccgtcaagggtggaaaagtccggctgtggatcaatactccgtttcccggaactttgcgtgctttcgggccgggaagtgaaaattttttcaattattccgccattgacaacgtgtggcttcccctcgtggggcttcatccggaaaccttccgtcccattccgggcctggcggaccgctgggctttgtccgcagacggaaaaaccgttttttatcatctggatccggaagcggcctattcggacggacgcatcgtgaaagcgcaggattttctgctgaacatttgcctccgtacgtccggttttgcccgggatccgttctggactaccctgttccgttccatgtatgatcagattacggtatacggggattccgtcattgcccttacgctgccgtcccgcgggccgctgctgccttacatggcctgtgcggattttcatccggcccatcccggtttttaccatgatttcaacgcgctgtttctggaacgctaccagtggaaagtccctccaaatacgggtggctacatggttgttcccgctaaaatccggataggagaaagcattaccctggcccgcgtgaaaaattggtgggcgaaggacaggaagtattaccgccattcctgcaatgcggacctggtggaacatgtgtttgtgaacatggaaaacaaggcggttgaaatgttccgccgcggggaactggacaccatgaacgttcgcaagccggaggtgtgggaagccgggctggagctgccggaagtgcaccggggctatatagataaatacagcctggaagccaattacgcctgtcccccgtacggactgtatctgaattgctcggacaagttgttgaaaaatccggatatccgccgcggtctggcgcattccgtgaacatgggcctggtgattgagaccctgttccgcgggaatatgagaaggctcggttcctacatggaggggtacggagacctgactcttccgctgaaagctccggaatacagcaagaaaaaagccatggaatattttgcccgcgccggctaccgggaaatggggactgacggagtgctgaaaaatgaacggggagaacggctggtggtggaactgacgtttgcggattcatccaccctgatgaccaacgtctgttccgttctccggcaggaggccctgaagtgcggtgtggacctgcgtctggattcccttacctacagtgtctgttcccgtaaggtttttgaaaaacggtatcaggcggctctgtgggcgtggccgctgcagacgccgttcccccggctgtatgaaacattctcttccgaactggcgtatgatgcccgcggaaatcccgtaggcaatacgaataatattatggctgtgtcggacgctggactggatgccgccctggatgcggaacgcaatgcaccggatatcggttctctgaagctggcccttcaccgtgcccagcagcgtcttcatgaactttgcgtctggattcccggctggagggaaccctacacgcatatcgcctgctggcgctggatacgctggccggaatctcccacccggttctgttcccccagaatttacaatccgctggagtcgcacctgtactgggtggatgaagaaatgaagaaggagacgctggaggctcggagcctgggcgtaccgtttgaggaaaagaatcaaataatatatcttgaaagacaggatggtgccgctccgtaataaaaccgggtcaccgtctcctttttaaattgaaaggaggtggtttttcatcataatctccctctcatttaccgtaattaattattaattccataaccatgaaattatcctttttctccgttctgcttctggcagggcatctttgcgtggctgcacccatgcctttgccggaatccaatgacggagccaggcatgtcttctctactaatcaggaaaattttttgatggacggaaagcccgtcaaaatcatttccggggaaatgcattatcctcgcgtgccgcgccagcactggaaggacagattccagcgcataaaggccatgggcatgaataccgtctgcacttatctgttctggaacgtgcacgaaccggaacccggcaaatgggacttttccggcaatctggattttgtggaattcatcaaggaggcgcagaaggccggcctgtgggtcatcgtgcgtcccgggccctatgtgtgcgcggaatgggaattcggcggatttcccggctggctgctgaaggatgaagatttgaaagtccgttcccaggatccccgcttcctggaaccggccatggcttatcttaaaaaagtctgttccatgctggaacctctgcagattaccaagggaggccccatcatcatggcccaggtggaaaatgaatacggctcctatggttctgacaaggattacgtgaaaaagcatctggacgttatccggaaggaacttccgggagttgttcccttcacgtcggacggcccgaacgactggatgatcaagaacggcacgcttccgggcgttgttcccgccatgaatttcggcggcggagccaagggcgcttttgcgaatctggagaagcacaagggcaaaacgccccgcatcaacggcgaattctgggtgggctggtttgaccactggggcaagcccaagaatggcggcagtacggaaggtttcaaccgagacctgaagtggatgctggaaaataacgtctcccccaacctcttcatggtgcatggggggacctccttcggcttcatgaacggggcgaactgggaaggcgcctatacgccggatgtaaccaattacgactacggcgctcccatttccgaaaacggaaccctgacggaccgctaccgcaccttccgccagactattcaggattattacggcgatacgtacaagcttcccgaacctcccgcccagccggaaatgatggagctgcctcccatcacgtttacggaaacagccggcatgttctcccgcctgccgcagcccgtcatccgcaaggagcccgtccacatggaagccttggggcaaagcctgggcttcatcctgtaccggacaaaggtgaacggcccggtgaaaggagagctgaagatgaacaacatgcaggaccgcgccatcgtttacgtggacggcaagaggcagggggcggcggaccgccgttacaagcaggattcctgtgacattgtcattccctccggacttcacacggtggacatttttgtggaaaacatgggccgcatcaacttcggcggccagatacagggcgagcgcaagggcatccggggccccattacgctggacggcaaaaagctggaaaacttccttatctacaacttcccgtgcaagggggtggagcttattcccttctccggcaagaagccggcgggcgaccagcccgtgttccaccgcgggtatttcaacgtttccaatcccaaggatacctacctggatatgcgggacggctggaagaaaggcgtcgtgtgggtgaatggacgcaatctgggccgcttctggtttatcggctcccagcaggctctttattgccccggagaatacctgaagcccgggaaaaatgaaatcgtggtgctggacgtggacggaggttccggcacggtgaagggtgtgaaggaagccatttatgaagtcaacagggaccccgccatggcggatgtcttccgcgtgggcaaacctgtggcccccgctgccggccagctggtgcacaagggttccttcgccaagggggcggaccagcaggaaatcaaattccgcgctcctgtccaggcccgttacatcgctattgtcagtaaaaacgctcatgacaacggcccccatgccgccattgcggagctgaacttcctggatgcctccggcaatctgctcccccgcgaacagtggtccgtggtttatgcggattcccatgaaacgacgggagaagccgcccaggcgggactggtgatggacaaccagcccaccacctactggcataccaagtggcagggggacaaccccaggcacccgcacatgatcgtgctggatctgggcaaggtgcagaaactttcaggattccgctacctgccgcgccaggaccgggaaaacggccgcatcaaggactatgaagtctatgcgtctcccaagccgttcaagcctgccaagtaagatcctctgaattgttgagcttttccagggccgctccctctcggctgagggggcggccttgttgcgtccggatgtccggaaaacagtcctcctcttttcctggacaaaagctgtgctggtttaaaaatacgtatcaacttttcgtttcccttgttttctgctgttgtgcgggccggtattccatgcgcaaaaaaaggcggctccgcagtataacggagccgccggaaggcagtaaaaacctgatagccggttgttagaagttccaggaaaagcccagcttgatggtgtggtagccgggatcattataaccctgaatctggtagtattcgtagccgatcaggaagtccgcgctgttggagatgctgaacttgaaaccggcctgggccgcccaggaaaacttggtggaggaaatggtgcgggaacggctgccgttttccaggccatgaatggtggtcttcacgtcgccgtaagtggcgccgactttaccgcccagatagaacatggtgtagtcgccgatgggaaggttcagcgtgtaaccggccatcatcggaatataggtggaacggaggctggcggtataaggcccgctgatgcccaagtcctgcacgctgggatggtgggaaccggccaggatgccgccgttcagggaaatctgatgaacaatactgccggtttcaatatagttgaaaatgctcagattgccgccggccacgttgggcatggcatctttggtggcgattccgtaagccccttccagggacatgccgaactggccgtcgtacttgtcggcatgataggcgctggcggaagacacggaggccgcaagggccaaacctaacagtatagtcttgttcatatggggataaatggtaaatttaactgtagtccattcttggcagttttctcttttgaagtcaaacatgaaatgtcaaatggacgcgaaatccccgagccgaggagatgaagttgccagaactctcccgctggggtacattctgcgccatggaacaacaagcgtgtgatttgctggtgaccgcttcccgcatgctgggcggagcggaacagtccgttgctcccggggatgcggccgtcgccgtcctggacgggaaaattctagaaacgggaagcgccgcagaactggaggccaggtggatgcccgccgtccgcagagatttggggaatgtgctgctgatgccggggcttattaatgcccatacgcatgtctccatgacctttttgcgcggttttgcggatgacttgccgctgatggaatggctgaccggacatattttcccggtggaagcccggctgacggataaaatcgtctacctgggggcccggctgggcatgtatgaaatgatgcggacgggcaccacggcgtttgtagattcctacctgttggaagccaacgttcttcaggaggcggaacgcatgggaatgcgctgtgtgggcggagaggttgtttttgcctttccctctccggcgtacggcgggtgggacggtgcggaagccctgtaccgggagcaggcggagcgcttttccggccgcggcagggtacaggtggccctgatgccgcacagcgtgtacaccaccagtgacgaagtgctccggcgttccatgaagctggcggaggaactggacctgatgctgcatatccatttgtccgaatccgccggggaagtagagcagtgccgttccctgcacgggggcaggcgtcccgtgggctatgcccgcgatatggggctgctgaatgaacgggccgtgctggcccatatggtggacgtgacggatgaggaactggaactggtggccgcttccggagcggcggttgtccataacccggtcagcaacctgaaactggcgtccggcttcgcccgcgtgcgggatatggtgcgggccggcgttcccgtctctctgggaacggacggagcgtgcagcaacaacagtctggacatgtttgaaacaatgaagttggccgctattcttgccaaggggtacagcggggacgctactgcggtccccgccatgcaggcgttgaagatggctactgaagagggcgcccgcattttccggacgccggggctgggaacactggttccgggggctcccgcggatatgatcgccctgaacctggatgaaccgaacctgtgcccgattttcaacgaaacgtcccatgccgtttatgcctcttccggcaaggattgcgtgttcaccatggtggaagggagaattttgtatgatcatggaatttacacggacggcctgtatgcggataccgccgcggaaatgcgggatctggtaaagtgggtgaagaatagtgattgagtattgaggatgagcgaataaaggcaagttctcaacacatgctttaatctctgggcccttacctctgctatctgtcggcctcccgaaccggcgcatgctcatattccttctttacccgcaaggggggatgcctttatagtaatttcatgcaatatgatcttatcgtcattggtggaggccctgccggctatgtgggcgccatccgcgccgcccagctggggaaatccgtggtgtgcgtggaacgcgaccgggtggggggcacctgtctgaactggggatgcatccccaccaaggcgcttctgaaaaatgcggaggcctaccggatcgtgacggaccgcgctagggaattcggcatgacggtggagggcgtcagcgtggattggagtgaagtgatcggccgttcccgcaaggtcagcgaccgcctggcaggcggcgtggggttcctcttcaagaaaaacaaggtggattccgttacgggggaagcctccatcatttcccccggcagggtggaagtaaaggccgccgacggaacggtgaatgttctggagggaaagaatatcctgatctgtaccggctgcgtcacccgcacggtgcccagccttcccctgaacggcactactgtcatcggctccagggaagccatggtgctggaaaagcggcctgaaagcatgatcatcatcggttccggagctatcggcacggaatttgcctacatttacaattcattcggcaccagggtgacgcttattgaagcgcttccccggatgcttcccaatgaagacgacgactcctgcatgacgctggaacgggcattcaagaagcagggcatcaaggtgatgacgggagcttccgtggaatccgtcacggaaacctgtgacggacaggtcagggccaacgtgaaaaacagcaggggacaggaagaggaaatcacggcggacgtctgcctggtggccatcggcgtgaagccggtcgttcccgtcgctcccggcctggaattgacggaaaagggattcatcaaggtgaatgaccgctatgcgacttccattcccggcgtttatgcggcaggcgacgtgatcggcggcgtgctgctggcacatacggcttcttttgaagctgtccaggctgtggagggcatgtttaatccggactaccagcccaggcaggtcggcttcttcccgagctgcacgtactgctacccgcaggtggcttccgtaggtaaaacggaacgcgccctcaaggaagcgggcgtggaatacaaggtggggaaattcccattccaggccattggcaaggctgtagccgccggagagccggacggcttcgtgaaaaccctgtacggcgccaaaaacggagaattgctgggtgcccatatcgtggggccggaagccacggaactgattgccgcgctgggcatcggcattcaggcggaactgacggatgaagatatccacgccaccattttcgcccatcccacgctgtctgaggccattcatgaatccatgctggcttccgaggggattgccattcacatgtaacggttttcacgggaagagcccctcaacggggctctttttctccattaaaaaagatgaacgataacctgcgctggaaacaaaggcttcaaaacctgaataaggctttttcccggttgcgccatgcttgcacgttgccggaatacaatgaactggaaatggccggactggtgcagacttatgaatttacgtttgagctgtgctggaaaacgttgaaagataagctggtctatgacggctacagcgttaacagcccccgcgaagccatcaggcaggcgtttggcgcagacttgataggtcatattgattgttggctccaggcgctggaaagccgcaatttgtttgtacatacttatgatgattccatcgcggaagaggcggtttccctgattaagggaaaattctttcccatgctggcccaatgtgtggaaaatctgaacatgatggcggagaaagaggactgaacgatggcctgacggccaaggtgcgctcaggcatccgggaaattctttcacagactccgcagattaggaaagccgttttattcggttcccgcgccctaggcacgtggaagcctgcgtccgatatcgatcttgccttggagggcgaggagctggatttgtctgtccttttgactctccaagcgcgtctcacagagttgaatctgcctgtggaagtggacttgattattcgtaacaaaattactaatcctgatttggagagtcatatccatgcttatggccaggagtggttttcccgttccatggaatgaaggggggtgattccggagggtcctgcctttgagaggtgataaagtgcctatgggctcgctaaaaaatagttggccatttcacggaagttttttcacaaagaccgggaaaccggatttatccggttggacggaatgcgggcgtaaagcccgcaaggcgcggatcaaattcttgtcccatgtagctctgccattagggaaaacggtaaaaggacaaaaaactccatggtttggcccgaagacggccgcctgggagcggaagtttgattcgccactgtttttccggggcaacgcgccgaaaggactgatttccgggaaaatactccaaagcaggaaagacattcagtctttcttctttagtctttttcccacagttcctcacagctcgaacaccgggttttccacggcattttttacggtaatgaggaattgcacggcctgcttgccgtccaccaggcggtggtcgtaggaaagggccaggtacatcatgggtcgggcgatgatttggccgtcccggaccacggggcgttcctggatggcatgcatgcccagaatgccgctctggggcgggttcaggatgggcgtggaaagaagcgacccatatgttccgccgttggagatggtgaagcagccgccttgcagatcctgcatggacaggtttcccctgcgtgctttttccgccagggaagcgagttccagttccagctccggaagcgttttccggtcgcagtcccgcagcacggggacgacgagacctttatccgtgccgatggctatggagatgtcatagtacaggttttccacgatgtccgtaccgtctattctggcgttgacctggggcacttcctgcaatgctttgactacggccttgataaagaagctcatgaaaccgagtttggttccgtaccgttcccggtacgctgcattgaattgtttgcgaagctccatcacggaggacatgtcgcattcgttgaaggtagtcaggatggccgcctggtgctgggcctctaccaaccgtgccgcgatggtacggcgcaacgggctcatgggttttctgatgaagcgcggagaagcctcctttcctgttttcccattttttccggaggttgtctgatccggtgaggatgttttcttttccggcttttgttccggggcgccagtcacaggtgagtagggaccggaaacgggtttctcccgcgtttccagtggtacggagggcggtgtggcggaacttccgtcaaggggggaaatgcggcctaaaaccgcaccgatgggggcttccgccccttccgggacgaggatttccagcacgccgctttcatccgcctccaaatccgtggaaaccttgtccgtttccagagtcaccagagtgtcgcctttggctaccgggtcgccggcattcttgtgccacgcggctacggtggcggaggtgatggattctccaaagttgggagtcaggatgtcgctcatgggagtaagatgggttcaggattgggcccgcggcccgaaggcagcggcgatgagtcttttttgtgcggcggcgtgcagcgctttggccccctccgcagggcaggccatggaggggcggcccgcatagcggaaggaagtggcgaagaggcgtcccagcctgttccgcagatggccccaggcccccatattggagggttcttcctggcaccagacgaagtcgcgcactttttggtagggcgccagcagataggtaagctgttcctgcgccagaggatagatttgttccagacggatgattaccgtgtctgaaatattccgttccctacggtaggcagccaggtcataatagattttcccggtacagaagacggcgcgcgtgacctggcccggcgcgggagtatccggatccggcagcacttcgcggaaacaggtggaggccaggaattcccggtgcggggagacggcctccggacgggagagcaggcttttgggcgtgaaaataatcaggggtttgtgtacgtgccggtgcacctggcggcgcagggcgtggaaatactgggccggagtggtgggattgatgacctgcatgttgtcatccgcacaaagctgtaggtagcgttccatgcgggcgctggagtgttccgagcctgctccttcataaccgtggggcagcagaagcaccatgcggttcttctggttccatttggcttctgcggcagcaatgaattggtccacgatgacctgggccccgttggaaaagtccccgaattgggcctcccacatgaccagcgcgtccggactttccagcgcgtagccgtattcaaagcccagtacggaggcttccgacagggatgagttgtaaatgcggaacgcggtggtgccgtgattcagtttttccaggggagtgtacagggagccgtcattgaagtcgtgcaggacggcgtgccgctgggagaaggtgccgcgctggcagtcctggccggacaggcgcacggtatggttttccgtgagcaggctgccccatgccagggattccgccatggcccagtccagcaggccgccttcccggaaggcttcccggcggcgggccaggaagcgtttttccagcgtggggtggggcgtgaagctgtccggaagttccgtaaggatacttccgatgcgctggaacagttccggactgattcccgtccgcgtgctggtgcgcgggaggggcgtttcatccgcatcctgcgcggtggcgggcaggatgtagtccgcggggttttccttcatttgcaggtaggcttgttccatgccctcccaaaggtcattccggatgtcctgctcctgctgttccgtcaattccccgcgctccctgagcgccattccgtacagggcggcggcggtggggcgcgcctcaatccgcttggtctgcatgggcgcggtgaaggcggcctggtccgtttcattgtggcccagacggcggtaacagtacatgtccagaatgatgtcccttccgaattcctggcggaactggagcgcgaagtccgccgcccacaccaggtcttccgggctttctccgttgatgtgcaggatgggggattggagcatctgcgccacgtccgtggcgtagcgggaggagcgggcttcgtccgggctggtggtgaagccgatctggttgttgatgacgaggtgcacggtgccgcccgtgcggtaacctttcagcagggagagattgaggacttccgccacgatgccctgtcctgagaaagcggcgtccccgtgcaggacgagcggcagcacacgcttgcgttccgcgtcttgcaggttgtgctgcatggccctggccctgccttccaccacaggatacacggcttccagatggctgggattggaggaaaggcggatatggagttctttaccgtccacatggcgtgtggcggcgtaaccgaggtggtatttgacgtcgctcctgccgatgggggattccggcaggtagtccggcgtgaattcgcggaagatggttttcagcggtttgtggagaatattggcgagcacattcagccttccgcggtgggccatgcccatttcaatgtgagagactccggcggcggggcagcgcttgatcatggcgtccagcaggacgatggctccttcccctccttccagggaaaagcgtttttcccccatgaagcgcttgcccaggaattcctcaaacagttccgccttgcagagatggaacaaggcttctctccggacttccgggccataatccacgccgtttgcccggagctggattttttcttcaatccaggagcggattttaagattgtctatgtggtggtattcaaatccgatggctccacaatagattttttgcagcctagtgatgatttcacggagcgtgaacgttcctccgtccatgaaggtgccgatgttgacgggctggtccatatcctcctctcggaatcccatatcttccggattgacggggcagccggtctggtccggaggatccagcgggttaaagcgggcgcattggtgtcccatgacccggtaggcccggatgagctggttgacgcgcccgcggcgttccgcgctttccggaggaacggtgtagggggatgtgtccgcggcgttccccgcattttctttttcccggggggctccaccgctccccagttcgtagccgtcgaaccaggcggcccagagagggtccacggacaggggatcgtttttccatgattgatggagcgccgtaatttcctccggcgggagtttggagaagatggaggcattcatgcggcagggcggatggtacagggcgttttcggttcgctgatcgctatttttgcccgcagggcatcagtaactgtgttcgttgagctggacttttccgcggaagacccagtaaatggcagcggaataagccaggacgagcggcacgcccagaatggctatgtatgtcatcacgaccaggctttcccgggtggatgagccgttggcgagcgtcagggaatgttccggattgggcatggagtagagcaggttggggaacatcgctgtcccgaagagagccatcatgcagcccatggtggagcaggaggcgacaaaggcccagcccggacggttcctgtggatgaatatccagatggacgcgatggaaatgaccgccagggcggcgattccgtaaatccagggggagcgttccagggcggccgctacgtgcggtacgtacagcagggtggccgccccgtgcaggatgatcaggacagtgaagatgatgacgcagggtctgagcagttttctgatttgttcctgcaggcttccctgggttttcatcagcaggtagattcccccgtgcatggcgaacagggcgaccgtcgtcagtcccagaagaatggaataaggattcagcaggctgagaaatgttccggtgaagttgccatggtcgtccagaggaatgcctttggtgacgttccccatggctacgccaatgagcagagctgccagaaggctgctgatggagaaagtggtgtcccatcccctgcgccaccatttcatgggctgtttgcttctgaattcaatggacacggcgcggaagataagggtgagcagcaggagcatgaaggccaggtaaaacccggagaagacggaagcgtatacgtacggaaaggcagcgaagagggctcctccgcccgtgatgagccagacttcgtttccgtcccatacagggcccacggcatttagtgtgagtcttctgttttcatcgcccttgatgaaaagctgaagagctccggtgcccaggtcaaagccgtccaggatggcgtatccggagaaaagcacgccgacgaggatgaaccagatgatttgcaggtctgcgagagtgagattgtccaacatgatttttaaagagggataaagattagtctttaacaaaaggaacctggagtttgccttccccggcgccgtcgtcttcgccagcttcctggtccggacctttgtggatcttatgggtgatttggtagaggaagagggccagcagcagggcataaatgacgaagaacatacccagggaggaaagggcttccgccgcggtgagggtgggggatacggcgtgttccgttctcaggatgccgtacacaatccatggctggcgccccagttccgctacggcccagcccgcctggttggctatttgcgggcccagtacggagaaaacaaagcaccagagcagccagcgcttctggaagagccagcctcttttccacccccacaggcccgccagaaacagggccgccagggcgcagccgatcaggatcatgagatggaaggagtaaaagacgggcaggatgggaggacgttcgtcctgcgggatgtcgttcatgccggtgatggacgtgtccaggtcgtgatgggtcaggagggtgagcaagtacgggatggagattcccgtcacttcatgggtggacgggttcatccagccgatgagatggaggtcctgaggggcgccggattccatgacgccttccatagccgcgaatttggcaggctggtggacggagacttctcgtgcgctggaatctcccgtgatgcccatgccagccacgccgatgaggccgatgaccaatgccaccttgaagcttttttccgatcctccggtaaaacgttttttcaaaatataccaggcggagacgctgaggacgagcgtggctcccgccagccagcagccggcgagcgcgtgcgtcaggcggtccacggtggacggattgaagaccacgtcatagaagctggttatatgggcctggattttcccgtttacttccaccagcttgtatccggcgggcgtctgcatccaggagttggccacaatgatccagatggcgctgaaatgggcgccaagagcgaccatgcaggaggaaagaaagtgcatttttgggcccaccttgtcccagccgaaaagcaggatggccaggaagcctgattccaggaagaaggcgaagattccctccgccgccagggggctgccaaagatgtcgcctacgcagcgggaataatccgcccagttggtaccgaactggaattccatcacgatgccggaggctacgccaagggcgaagatgataccgaagattctggtccagaatttggcctgcttgtggtagaggtcattcttcgttttcagccacaggccttccagggcgaccagaaccacccccaggccgatggtcatcggcgggaagatgtagtggaacatgatcgtgatggcgaattggagacgggataataagaccggatcgtccatgattgattggggatgagtggatgtttatggaacaggaggacggcagccaaacaccgataccttcatactttatacatcccaagagaccctttgttcaattattttccttttccgcagataactttttagattacgtctagaaaagaaaggcttaacactggatgaacacgtccatcccttcttccgccagagcaaaaagagccatcatgtccctgggagaaaggcgtatgcagccatgggaagccggggtgcccagcagttccgtatcgttggtgccgtggatgtaaatatagcggctccgggtattggcgttgtgcggttccagtccgtccagccacagaatgcgggtcaggatgaagtcggaatgttcattcagacttttcgggatggcggtaggatagcggcctgccggaaggcgtgagatgaaaatagtgtcctccggttctccgtccccgatttttttgcagatgcggaaatgacctgtgggggttttcccggaaccttcttcatggcctgtacctgccttcccgctggaaacggggcattggagcaggatttttccggatttttccagcaccagttcctggcggggcagattaatgcgtatggatggggaagccatgacgggggaaggagtcaaagaggttgctactcctgttgctccatccgggcaatgatggcctggatggcggttgtcaattgccgcgctacattgttgtaggctgtctgtccgcagccgatggggtcggcgatgccgcggttgcccgtgtagcaggtgaccagcctgaccttgtccgcatgttctgggaaattggcaagcagggcggccaggtggctttccgtcatggcgtagacatctgtggcgtttttcatcagttcatccgtaacagggcggctttcatggctggagagattgacgccatgctcccggaggacgtggagcgtttccggactggctgcttgcccgggccatgcggctgttcctgcggaaccggcctgccattccggatggtgcgcggaaagtttccggaacaggccttccgccatggggctgcggcaggtgttgccggtgcagatgaagaggatgtgcttgcgctgtgtcatgagtcggggcgttctcttttggagtgatgggggataggtacttcgttgggttcctgatacaagttgtccgggggcagcacatgaccggctccgctgccttccgacgagggtgtgccgtcgtcttcttcatcttcatcctctgcatcgcgggaggggggggagagctgggggaacagactgcacgccagggctacgcacagtaccgccgttacgggagtcatgacggggaaccatgtatcatgagcggaaaacaggtaccatgcaatgaacggaacgaacaggatacagaggccccaggtgatgaagcgccctctgcgttggaaacgcaaagcccatacggacagaagcaggacatccagcacgatgatccattgtacccaggcgggggctatgggaatcaggacggcaggggcaggggcaagcgctcccatgatgctgcggacagtttgcgccgccagaagggattgcgcgtccggcgtgtcggaaagggcggatggttcggaaacgagtaccgcatccgcagaggaaagcagttttctgacggcagtagtatccggtgggcgcagaccggacatgacggggacgatcacttccttcgtgtccagaatggtggggctgctgtttgccgccagggggatgcggccgtgtttatccagagggatggagcgtttgccgcccagaaaaagggtgtctcccggaatgattctgacatcaccgggtttcaggtccagggcattcagagcggcgaccagaggaagagtgggaatgatatccccgccccagcggatgaaaagcggaggggacaccctgttttccggagctggggaaaacagctcgttattttccacgacggttcccagggagggggctgacgtggttatttgcggaggttcccctacgaacctgtccgcgcgcgggaactggtccgtctttcctacgatgttggaagcgggaataatcaagtctttccaatccggcagaaggggcgagcggcgggcggattcgctcatttgccggcccagagccttgtggaggaagcggtccagttcataccccacggcggctttgacgatgctgtccggcttttcttcccaggtcatgggggacatcacgtaaacattcctggctccctgttcatacaggtgccggaacagcactgtgtaatccatgggattgggaggataggaggcgaaactgttcagtgatgattcccggtgcagggaaaccacgggaagctgggccgtctgccctttgttgaagtaatcgtagggctggaggacgatgctgttttccgtattcaacccttccgggcgaacagtccggtattccccagccagcaaatgttccgctgcctgttcataacagaaaatggtaggaggaagaagcacataccccagaatccagcccagccccagggaaatctggaacagggacaggataagcaggaatttggggggaagcgtcatcagaggggctgggaaaaatcatgctagcatagcagccagcggttctgcaagcgtggagccggacagaagcttccgcaggtgtcccagcccggcgggaatctgagccagataccaggtttttccctggttgtggccgatattggcgtaagcgcccagcatctgcataatccgctgcagggcgcaggcacggaaaatgcggtgatctatggagtgagcggagatattttcccactccctgagcaattcatccgcctgttccggttccagacgggcgtagccgtcatagaccagggaggccagatcatattccggacggccgccgcgcatgccctgaaaatcaatcagccaggtttttcccgcgtggatatgcacgttctgggactggctgtcccggtggacggggcattccggaagggccgccagaaactgcgcctgctctttcagggcgggatggttcaggaaggaagccggttccaaccccaggtgggatcccaggaaatgttcagcaaaataggactgctcccagcggtacaaggcctcgtcaaaagcgggctggagggggaagtcctccggaaacgggcaggagtgaagcagatggagttgttccatagcctggatgtagcgcaggcgcagggaaggccagggttctttccggaaagccagcaggttggcgtctcccaggtcttccaccaaggcggctccgcatccggaaccaagaggttcataatcgtaaatttccggcacgttgacaccgtgggcgtgcagatgccgggctgcggggataaaagaatcattgtccgcacggtcatttccccactggatgccgatgcatgtgcggccgccaaaatggatgcggacgatcgtacggccggaggctcccaaagccaggggacggaaatcttcctgacgcggaataatgtgaaaactccggtgaaccagacgggacaattctttcatggaaaggtggcgtggctacgttaagagccttgcgtaaggatggcgtatgaaggatgacggcacccttcatacgccgaaaatgaggaaaggcagggcaatcaggcggggaactggtggtcttccccatagccgtaatgctccacgacgtaatccacatccttgtctccgcggccggagcagtttaccagaatggcgcctcctctgttttcccgtgcccacttcatggcatacgcgatagcgtgggagctttccagagcgggaatgatcccctcgtaacgggaaagtttgaagaaggcgtccacggcttcctcgtctgtggcggtgacatagttaacgcggccgatgtcgtgcagataggcgtgttccggccctacggaaggataatccaggccgctggctacggaatgaaccggtcccggattaccgtcttcatcctggagcatgatgctttcaaaaccgtgcaggacgcccttgcgtccataggtgatggaggcggaatgatccccaagcctgggacctttgccgaggggttctacgccatagatatccagcgggtctcccaggaaggcggtaaacatgcccatggaattgctgccgccgcccacgcaggcgcagacggcgtccggcagaagtcccgtcatttccaggaattgttcccgggcttccacgccgatgcacatttggaaatcgcgcaccatttgcgggaaagggtgggggcctaccacggaaccgatgcagtaaatggaatcctgataactgttcaggtaagattcaaaggcggaatccacagcttccttcaaactttggaggccgtgcgtgacaggcaccaccttggcacccaggattttcatgcgggtgacgttcggagcctgcttggcaatatctaccgctcccatgtgaatttcgcattccaggccgaagaaggcggcggctgtagccagcgccacgccatgctgtcctgcgcccgtttccgcgataatgcgcttcttgcccatgtatttggccagaaggccttcccccatgcaatggttgagcttatgggcgcctgtatggttcaaatcttccctcttcaggtaaatttgagaggtgcccaggtggcgggaaaggcgttcgcagtggtaaaccggggtgggacgtccctgaaactgtttgcggatgcgccgcaattcattaatgaactgggcggagtgggctatcgtctggtaggcttccgtaatttcttcaaaagcgggaaccagctcgtccggcaggtaaacgccgccgtattcgccaaaacggccctgggcgtctggaaaattgcgtaaataagtatggagatccatggtctgttgcgttcgtgactgccagtatttagcacgatgccacaattcaggcaaaaacaatctccccggaagcccttttaaaaaagaaaggaaagaaaaaggacttccccgcaacaggggaacggtttctccgggagagaccgggaggaaaaatcggaaatcaggccaaacggcgctttctgatggattttccggtatcggcaagcgtctggcgtgcgtccggatccgctccggccatcaaggctgccagatcccgaacgatgttctggcgcatgcgagctaccagatcgcgcccttcctgggtgatggcgaccatgattttgcggcggtctttggctgcgctcatgcgtttcaggtagcccatttcctgtaatttatccaccatgccggtagcggccgcggtagaatgccccattttctgggcaatgctggacatgctcagaaaatcttcgctggccagataagtcagcaggaaaaactgggggtaggaaaccttgccctcattcaattctgaagaaaggttcagaatgcaggaacgttgcgtgaacaggatgaaatccgccagcttgtttgcttcttcggaaatggagctcatgatcgttgtgaatgtatgggagggttgatagcgatacccgtccggagactcgccggcggttcggccaacctaccgccacgtccttctacgggcaagtcaaaaatataaatttttattaaaattttacatttgcggataataagcattttgatggtatttgaaatacaatatgttgactgttaatagaatggatatattctgaatatagaatgtgaataacatgttaaaaatagatataagctattgataaacggtagtttttcacaaaacttccgggaatccgcagcaaatctggcataaagaggcgttgcagcatgacaagcctggattgaagagggctcttgtgcagaggcttttcatgggaaataaagccttgccggaggaaaattttatacagcgggaagcaatattttcctgcccttgagacggacttggaacttctgcagtcttgacgtgagagtagagaaagggggcgttgaaaactttctttcatggcctccttcctgccgcgatagttgcggttccttgtttacggcggtatgagtctatgacgcttgtaaaggcaggaaaaacctttttaaacggtcctgaaaggaggggaaaagaacaaacggaaacctgccccatactgatggagcaagcgccgttacagacccggtttgggaatgacgctctgcttttgggagagaaaaattgcttcttccccaaaagtcaaaggctggcggaagtaataggggaaaatgctcaaggagccggaaaaagactgccggggttctaagaggttacctgcaaaactcctattatccggaacggcctattttgaaaatagtccagcggcagtgaaagggccgggcgcatcaaccgcattaataaatgctccattacagatgacgcatcattggttatcggcacggtgtgtaaaagagcaattgcgccgtccatgttcatattctgaaggtccgttatcaaatgttcacgaccatggaacttagagccgttaccattacatttcaatgatatcggtttgctggggatgcgtggttcattaattttttcagcatttattgtttacgagtggttcttatgtcattcctcgctattccgcacaacggaaaattttgtgatccgtcggcctgtttcctgaaaaataagaaagacggcgttgcttgccgtcccagctgccgccatacagcaaatccagctgcttgcagcattgcaggcagaaaatcatggaataaaacattactgccggcaacatcattgcatgccgccaaccttatgcttgtatccgcaagatattttattcccccgccattctccggtaagttttttctggaactcttttccggagaatggacggagaacaatagcaacaactagttggcgggaggcggcgtaaaggtgcgggctgacatatccttgtccagaaccagcattccctgtccttctcccttaatcatgcgtaatttgctgatgatgtccttgacggtttcttcctcttccacctgttcggtgacaaaccattgcaggaaaatatccgtggcgaaatcccgttcttccttggcaagatgcaccagctcgttgattcggcgagtgacttcctgttcgtgggacagcgtttcttcaaaaatttcaagaatattggaccagtttgcatccggagcgtctatggaaagcattgtaacctggcctccgcgggaaagaaggaaatcataaaatttcagcgcatgagcggtttcttcctgatattgaatgcgcatccagtgggaaaaacctgtcagaccggcatcctgcagataggcggacatggccaggtaaaggttggctgaatacatttcccatttgatttgctcattaagagcagttgccattgttgtactgatcatattgtaaaatcctgttgatttttcccacttctacaaaacaaagtccgcaggatcaagataatcctgcggactgtatgacgggaagggaaggcgtcaggcttttgcggaaacctcctccggaatattattttcagggagttcttccgccggaacggaggggaattctttagtttccgtaaccacgctgttttcttcagatgcttcctcccgggcggctgccgcctcggaagaagaggcggccttctgtttttctggtgcagcggagtccgttgccggcgcgtcctggcccttctcttccggtttccgtttttccttgggagccttcttgggagaaggagcttgagcggagacggttcttggacggctgacagtgttattggagaaaacaaggatgtagccctgttcggacagccagagcagatcacgaaccaaattctgctgtttttccatggcctgggctacttcttcttctgtggccttttcctgttccgggactggggccagctctttaagcatggcatcgacgcctttgccgggattattggccgcccaggtggcaatggacatcagggaatctgataagacggtgccttcttccatggccttggggcgtgccgggccggtgtaatggttgcctttccacttgaaaataggcatatgatgccgggctaacccgtggcaaaggttgggaatcagcatgctgggatggcggcgggtggtgccggataattggatcaggtgcgcccacagaccgggggagaggtgattctttttcacggctccgttgacgaacaccttgtccgtaacgtcatagcactcgtcaaagtggttggattcgaaatcctgttctaccgcggcgggagattccagaagcacttcggaggctccttcccgaacgggcttccaggcggtgcgtttggaaacggcttcctgccatgcctggacagcttcttcgctcttgtccgtcacaatcttggaacggaaagcctcaaaagtcatgttggcaaatttggtgcgatgcaggttcatcagggcggactggtagccgtgccaattaacgggacctatcagctcgttgtttaaggaacatttggcaatggctttgaaatctccttttggagcttccacttcctgttctacggattcgtaatatttgggcatccaggtggactgccagaggtgtttgacggcctcctgtcgggaaataaagcaggcgccgtcgccatgcttgcaatggtacagatccgggccgttttcctgcttcatgaataccaggtcataacggtcgtaggaacccatgaccaccttggcaagatccagcagggaaatggtgcggcggtgtttctgtacttcctggtgcagggcagccaggccggaatccacggggcgcagctccacgcgcaggccttccgtcggttcctccatggcggagcggggagtttgatcgcggcggttgcggaaggagccgcgcgtgcggtcttcccggttaaaccttctttcgccgctttgaccgtcaacacgacgttccccccggggctgacggccttcacggttgtcgcgccgcggtcggcggtcgcctccctgcctgtctccggacctgcgttccgggtaggatacaggccgttcctgacgggctcccggtctcgcccaggccggaccaaattgaaagtcggccaagccggaaaggtccggaatctgctgcttggggtctgtggaaggagtttcgtcggtcatcatgtacgggttgtttcaatagcaactaaatgaggtggatggcaatcattttacgtgcaaacagaccgaaaattgttcaaaatgtcatgaaaggcatctggaaatgcaactatttccggtgtatcctttcaactcaacttctgtcaaatgctctatatggataaaatacgtcaacgactttccgaccttggttacgccatttacgatgctcccgctcccgtaggctcctatgtgcaatgcgtacgcacgggcaacctgcttcacctctccggcggcatttctgtgaacggggacgacaaatactttggcaaagtagggcaggagctgacggtggaagaaggtcaggccgctgcgcgcgccgctattttgaatcgtctggccgttattgtgcaggcggtggggtctctggaaaaagtatcccgaatcgtggccgtgaacggatttgtaaatgccggcccggatttttatgaccatcctaaagtattgaatggcgcatccgatctgctggtggaagcctttggagaaattggccgccacagccgtacggcggtaggcgtatccgccctgccgctcaatgtagcggtggaaatcagcatggtggtggaagttcgtgattaatatttaaaaaccggaagggattcgtgcttgaatcccggcggcattcctgtagagtgccgtccggtcaatgccctcgtggcggaatggtagacgctgcagacttaaaatctgttgtccgcaaggacgtaccggttcgagtccggtcgggggtactttatcgaaattaaatcttgtaaataaaaagcccgctgtttgcgggcctttttgttttgcttcaatatcatttgctggctgattctccatcaataatttttgttttcccggatgagtaaaacaaggatggtggtgtttcgtggctattcttgtcatgaaatgcagaaagcagagagaagaatgttgagtggaaacagttctgaaaaaagagtttgtaacagggcgcctcaggctgaaaaatagaaatacggagtatgaaattgttgggtatcttccggtttggaaaatcagatggttcatggcgccctggaaaaaagggaatgctgctggcgttgaaaatagcaggaggcatgtttgcgggagcggttgtggtatgcgttgccgcagaatggtacatttattccgtttcagagggcaggattgttgagcattccagggatgttcccgttcgtgctcctgttctggtgttaggatgctccccaacattcatggggagccctaacggatatttccataacaggatggatacggcctcggaactttggaaagatggaaaagcaacggttttcatcgtttccggagataatagttctcatgcttacaatgaaccggaatggatgaaacaggctctggtggaacgtggcgttccagaggaacggattgtatgtgactttgcgggattgcggactttggattctgtcgtgaggatgaaggaaattttcggcgtttcgacgatgattgttgtttctcaggaatttcataatgaacgcgccctggcaatcgcagcgcatgaggggatggcggcctgggccgtcagcgcgccggatgttcccaaccgccgttcccgtatgaaaagctggttcagggagcgtgcggcccgcgtatggatgatgctggacttgtgggtttggagccgtgaaccccgttttttgggagaacctgtggttttgccggaaataaaagaggaaaaatgaacaatacttcatgcggcagggctcgtcataagatgtctttgatgcggtacggcaacccagaaggagggtgtgcccgcgcctcgaatcattaaatgctgaatggtccaatcatgtcggctacgtgggatgatttgccatgaagatgaacaaggccagaaagcctgagtgaacaattcgtcatgaagacggtcggaggtggtggccgtacgtttcattgtccttcatggaagaaacaggtgcaatccttccccttatcttatgcgtatgggtgggcaacggttgaaaaaaggatggttgggaaacatcagaaagctgatgctctggtcggaataagtttgcctccatatctttagaaaaaacactccggaacaggttctgttgcgttttgatgcggctgacgctccctgttggaattccatatttgattaaaaaggggaaaggatacggtaaaaatcattgactctttccgggaaagtgctatgcagatttcagcggcttgtgaaaagcgggctgttttattccggctgtcatgttcccttcttctagcggtcaggaaggccgtctctccaacggcaaaggctcggttcaactccggcagggaatgccattcggcagccatgttttgtttcctgccgtgaaaaggcggtaaattgcatcaggaaaagcaaactacgggggagttatgatggaaatacgctttctatgactttccccgtccattccggtagtggctttcctccgaataaatgaagaagcatgggagcggtattggtggtattgtttggttcggaaatcaggaaatttctcttaatgcccggacctgaaattccccatggaactatcatttccgctgcgctcgtccccccgtggccctttccgattcccccatgatccgtcagaaatagaaaatgcgtatcgttgaataagtcttcctgcctcaatttctgaaaaaagattccaatttgctgatccgtctcttcaatagattgaaggtattctctggacatccagccgtatttgtgccccgcatgatctgtatgaacggaatagagaaaaaccacagtcgggttgtagtggtgtttcttgacgaattggaaagcctgatggtaattggaagcataggcgtcgtttgccaggtacttgatttcatccaggtattttttgttgaacggataggcaagaggtttccaattatagtaaaaagctgttttgcaggaaggctggcattttttcagggcctggaatacggagggataatatccgtcttcgtctctccgtacggcggggtaggaggaatttgccggcgtccagttattattgaagactccgtgctgttccgggccgctgccggttaagtgactggtccagttaggtaacgtgacggagggcatcacaacccgcgtatccagagaaaaagctccctgtgacatcattccttttaaagagggcgcatgcgccttttgaaaaccttccacacaaataccgtccagggaaatcatgatcactcttttggcggaattatcggaagttctatctggtacggaatttctgggaatgccggaatcatattgtgtagcggcaagggctgtattgcccgttgtcattcctgctgccgccaggcctaattgattcaggaaattccggcgtgttgtttgatgataagagttttccatataaagtacatactgttggcttgaagtatttttatcaacgcttctggatattcgggaagctcatttcatcgtatagttttttacggacaggggccgaatccgggtttcaaagcaatttttccaataatttgttcctttcctgtgatagaatggttttatagagaaaggatatcatcatttattgtattcaaatagttaagtgggtgtgacaatataggaatgctccgcaggctgtctcatctgcgatttaggcaaagcatcttccatacgcttcaaacgagggggcatatcatatttgttacgggccgtatcctcatcaatgttggccaaaatgccgggcgggagcggagactttcaatctggacgttttacacaggatgacattttccgcgagctggagcagatttttcaaggaagtgggtgttacgcgctgccgtgtggtacagtcagctccctgaagaaagatcagccggaggcagacagatgtccctgatgttattcctccaacaagacgggacaagcccggcaggtgtgggtgtttgccagccatcacgatgctcgcgccgccattattaaatcagccaattagcataatgataccatgagagagatacaaatacagttttccaagcccggtaactggagggaattcacactgacggccatctaccaggattcggatggatatacccgcatagaccgctataaacagaatgatataccgtccgggcaggccccggctttgagcgcggctgtagccgtcattgcagacatggaagaggactggcaagccgtccaggtatgggcaaggctgggaaatacctctgttctcaataattccgcaggagacgatgaggccgttgagtttcgtgaagccgttctactgacgattgaggctgtcaatagcctcgggggccgccgtatttttacccccggtaattatgcgcagttcatactgatggattttgcctccatatcgtttttcaagtattttaccatcagaaaataataaggatatcagcaaataagattgttggactgactgcatgattgcggcagactgggggatatgtgatgcagtgtttttttccggacaaggcgtttccggatttgtcgatgcattgcaacagttttaaatggaaaagatgttcctcccaggcaggagaggatcaaaaacagggaatcaatgacagtaaccccatgagtgacgtaaagcagttcttggtcaacgttgggaacaggaagggcctggtttgtcgtgatgactcaaaaattgcagattcccttatgctctaatgtttatcggaaaacctggatggagtatcgtcatgcggttttaaaaatacagtacattgtttctaaaagccgttatcatgtactgcggttctataaaaacaacaaccgcaagcattctatttcaaacgcttgcggttgttttgaaatggtggaggcgacgggagtcgaacccgtgtcctgaaggccattgatgacagcatctccatgttcagacgcatattgctgctttcgcggctgcttcgctatgcgtcaactaggcaagctcgctagttgcctgtggaagtctcgtgcgttgcgcggcaaccccgcattgcaccagcctgctgtgtcttcgtcgtcccctctagcaggcgttgaggttctgacgcggctgaactaattaggcagccagagcaaggtcgttagactctgcatttatttttttaatcggctttttagaaggccagccgattaaccttcacatgcagccagcaccgcagacttccagtcgaaaccatggcgcccccatatgtatttaccagtagagacaaaaaatcccgccgtgatgttcaggcaggaatcattttatttgctggcagtgatgcaagtggcacgcccgtagggattcgaaccccaaaccttctgatccgtagtcagacgctctatccaattgagctacgggcgctttgacttgcgtcgtgtaccgcgtaagcggtgaaggaaatatagatttttcttcgggaaagtcaagatgtttgtaagatgatttgagaaaaaaatcatttttctctttttgggagaataaattttcagagaaagaaccgttaactgaggggtggagaaaaaggggaaaggcgttgcgccatggaatggcctgtggcacactaaacggagaaaatgagcgagttcaaggtgatcaggtcgccgatggaggcattgaagaagtacttcggcttttcctgcttgagggagggccaggatcaagtggtggcttccattatggaaggccgcaatgtattggtcgtgatgcccacgggaggaggaaaatccctgtgttaccagcttccctccttgtgccgggacggggtttgcctggttgtcagtcctctaatcgctttaatgaaagatcaggtggatgctcttgtcgccagagggattcccgccaccatgattaacagctccctgagttttcctgagcaaaaggaacgtttggaaggaatgaagaagggtgcgttcaagctggtatatgtggctcctgaacgttttggtcatgaagggttcatgcatgctctggcggaggtggatgtaaatatggtggctgtggatgaagcgcattgcctgagccagtgggggcacgatttccgtccggattatctgaagctgggaaaagctgttgaaatgatggggcggcctcaggtggctgctctgaccgccacggctactccgcgggtgcgggaagatattctgaaacatttggggctggatgatccggtgacgatcgtacgagggtttgcgcgggaaaacctgcatttccgcattactgcgtgcgatacgcacaaagacaaatacaagaggctgtacgaattggtgaagcgttacaagacgggtattatttattgctccacccgcaaaaaagtggagcaggtatatgaggctctttccgattttggattgagcgtgacagcctatcacgcaggcatgacggatgaacagagagaggaagcccagaacgctttcatgaaccgccatgcggatattgttattgccacgaatgcttttggaatgggcattgaccgtgcggacgtcaggtttgttgcccattttgagattcccggcagtgtggaggcctattatcaggaggccggccgagccggacgagacggggaggaggcttattgcgaacttttgttcaaccatgcggatttgcggacccaggaattttttattgaaggagtgaatccgggaattccattgattgtggagctgtacgagttgctcagaaagcattgcagcgcagaaacccacgatgtcatgtggtctttggaggaaatggcggagcgtctcaaatgccgcaatgccatgcaggtgggagctgctttatccgttcttatacgcaatggagcgatcagccgtcatgacgttccgggacaacgcgtgaagcttaccagagtgacggatccttccgtaagcggcttgaagattcctctggatgaagatgccctgcgggaaaaggaagtgagggaccgggaaaaactgaaggcaatgacggagttcgcttattcctccggctgccgtcagcaatggattttgaattatttcggggaggaagatggagtgccgtgcggccgctgcgaccagtgcctggccctgggcgttgaggaaggacaatccctgggagaagaagagactttggtggtgcggcaggcgttgagcgggattgcgcgcgcatccgtgcgtttggctgatggttcctggcagggaaggtggggcaggacgaaaatcatccagatgctcaaaggggcgaaaacccaggagttgttaagaacatccctggtccggctgagtacttatggcatcctttcccgatggagtgaggacgatatccgccagttgttccgtgccatgcagatggcgggattgaccagaatgagcggggaggcggaccgtcccctgattaccctgagtccgaaaggaaatgaagtgatgatggggcgcaagaaggcatctttggtttggccttttgcccgccggggaaaaatatccgtatctatggagcaggccagagttcggtctacgggaaatttggctgccctgggagagtttgacgaggatttgtttttgaagttgaaggagctgaggaatgaactggcacgggaagccgggattccggcttatgccgtgtttcataattctacactggaaggtttggccaggttgaaacctaccacccgccgtggtgctatgaacgttcacggcattggagagcagaaagctgctcgttacttggatgatttcctggaagtcattgccgagcattgcggggtgtgaatttgtctttccgatttgctccaatcaggcgtacgccgtctctggaatgtggtgttcatgctgaactgaggaactatttttcatgaattacggaaaaaatgttccatgctttgctaatatatttgccgggaaaatgtgtatttgtttgaataaattgttcatcaacatgaatttgtggatattttgactctttccagaaggttgtttttctgacctcatggaataatcaaatgaatggttgtctatcccgatccagtaggatctagaagattgcctgatcaatatttttgactgtattatttatgtattgacttcattttgggaagcgtgtagtctcctttccacacattacccaagacggagcggtggctgagaggctgaaagcactcctttgctaaaggaacgtactggcaaaaccggtaccgagggttcgaatccctcccgctccgccaaaacctttcttttttaagagtctgcactttaacggtgtaggctctttttctttgcaaaccaggggattagatgctggggaattatttgctggtctgattgtcttattttagttttttattttttcatttgaaattgaataacttaggccaaaaacgccggttaggatgtatagccagcgttttttctaatatccttattataggcatcaggataattataggtgcatttggaaaaaggtctggactggaggctgtccctgagggtatttgtgtgtgtgaatgatgatataaatttttgaatgtaagttagttgttgcaggagatggacaggataaaactgccgtggctggtaaaagtggagagtgcccggaattgaatggacacgaatgtggttcatgcgccggtctcggagtggttcacggccgcatcggatatgttaacagcttcaggatgtgtgggaaagtatggaacagccactccagaatgggctctgtctttttttaatctgcggaggatttaacggattttggaataatctggtgttatcaatggtcaagaccatgaataacaatattaaagaacatcctatccaatttgaagcagatatgattcgggcattgctgcaggaatacagcactcccggcgagcacaaaaatcaaacccgccgcacgtgcggcctgaaccagtttaatgatctccctgaagctttgaaagaaagagggtgggagattcaggaatttatagaagagtccggctcgtggctggctgtttccgaggaaggaagcggaaagttttcagatatttttatcccgtggattgaatgtccctacgggaaagttggcgaccgtttgtgggtgcaggaggagatttgccataatagccgttctggatggctttattctgctgatggcgtttgtttgccaatgtcatatccagacggatggatatcaaaaaatgcccgcaggcagtttattccttcgatccacatgccgcgttgggcttcccggattttactggaaattacggaaatcagagttgagcggcttttggacattacgacgaacgatgcacggatggagggcattgaatgtgtttggcacgatgaagaaacggatgcctgtttatggagggattactcgggaaaatctgcggggttggcttttgcccggttatctttcttctctttgtgggaaaaaataaagggaaccggttccgctgaactgaatccgtgggtatggattattaagttcaatgtgttaactatcaacggaaatatcaaataaagaatgttaatgccctttgtgaagaacaaaataagaatatgtcttttacagagggttcgcccactaagcggagggaatagcctccgttgcaattcagataaaatccgcgtgatgtaatcaactccgttttatcatgaaaaaagcgccttccggcaagggaaggcgctggatatgaaaaggtgaaaaagagggaggttacatccccttgtttttcatggcttccgccagggcggctcccatctgagccggtgtcttggcaaccacaataccggcgttcttcaaggcttcctgcttagcggcggcagtacctttgcctccggcaacgatggctcctgcatggcccatgcggcggcccttgggcgccgtggctcctgcgatgaacgcggcaacaggttttttgcagttgttcttgatccattcagcagcttcttcttcttcagaaccgccgatttcgccaatcatgatgaaggcgtccgtgttcggatcttccgtgaagaattgcacggcctgttgctgggtcatgccatggacagggtcgccgccgatgccgatgcacatgctctggccaaggcccatgttggtaacctgccagacggcttcataggtaagcgttccggaacgggagacaataccgattctgccgggtttgaagatgtaggccggcatgatgccgatcttgcagttggcggaaggattgacgattccggggcagttcgggccgatgagggttacgtccttgtccttcaggaaggttttcaccttctgcatgtcctgcacaggaatgccttccgtgatgcagacgatgagtttaacgcccgcgtcagcagcttccatgatggcgtccgctgcgaagggcggaggaacaaaaatcatggaggcattgcagtccgtagcttttttggcttccgccacagtatcgaagacggggactttgccttcaaagagctggccgcccttgccgggggtcacaccggcaaccacattggtgccgaagtccatgcagtttttggcgtggaacgcgccggcgcttccggtgatgccttgcacgaccagacgggtgtttttgtcaatgagaggtgtcattgtcgtaataaatagtgagggttatttaactgccgcaaccgctttctgggcagcttcgtccaggttgtcggcagggataatggagatgccgctgtctgcaaggattttcttgccgatttctacgttggtgccttccagacgtacgacgagcgggattttcatatcgatgtttttcgccgcagccacaatgccctgggcaatgacatcgcaacgcatgatgccaccgaagatgttgaccagaagggccttcacgtttttgtcgctggtgaggatgcggaacgcgtttgttaccatttcttccgtggcggagcctcctacgtctaggaagtttgcgggttcgccgccgtagtatttgatgatgtccatcgtagccatggccagtccggcgccgttcaccatgcagccgatgttgccgtccaggccgatgtagttcaggtcgtacttgccggcttccacttcgcgggggtcttcttccgtttcatcccgcatttccatgatttccgggtggcggtacagggcgttgtcgtcaaaattgaatttggcgtccagagcgcacacgcggtcatccgtggtgactacaagggggttgatttccaccagagagcagtccagagcggtgaaaagcttgtaaacgttggtgatgagcttggtggcctggcggagcaggggaccggtcagtcccagcgccacggcaattttgagagcctggaaaggcaggatgcccagcgccgggtcaatgtgttcgcggataatggcttccgggcgggtggcagccacttcttcaatgtccatgccgccttccgtactggccacgataacggggcattcccgggcgcggtcctgaagaatggcgaagtagcattcctttttgagatccacggcttccgccaccatgattttgctgaccagcttgccggtttccccggtttgcttggtgaccagaacctggttaagcatcttgccggcgacttcttccacttcctccacggacttgacgacgtggacgcctcccttaaaaccgtttttgaaggtgcctttaccacggccgccagcgtgtacctgtgccttaactacgtattgggagaggcccatgttccgggctgtttgtgctgcttcctgagctgtggcggcggcaatgcccttgggggtagccacgccaaaacgctcaaagagttgttttgcttgatattcgtgaatgttcatgacagtgggccgtttggccaaatgtttgcggaagaaaggctaggactatttttgatgtcggtcaagggagaatggtttggtcttttgattttttgtccggaggtgccgtgaagccctgttggaaatcaaagaggacagaaggcttgactgcgtgcttaaagattgggaaacttccttcccgtttttctgtagagactttttatgaaaatttaccgtccttccgatacctgctttgacgaaatgaagcgccggatgaaccgccgcgccctcccggaggattccgtaagggataccgtgaacgctattatccaggatgtttccgcgcgcggggatgaagccctttttgactatgcctccagatttgacaaggtacatcttgattcttcctccctgttcgtgacggaggcagagctggcggaagcggaggccatggtggaggggagtgtgaaggaggccattgccgtctctctggcaaatatccattatttttcagaccgcagccgcaggcaggactggtccggcgtaaatgcgcagggcgtggaggtggcggagcggttccttccgtacgaccgtgtgggcatttatattcccggagggaaagcgcccctggtatccacttccatcatgacgggcggttttgctcaggccgccggcgtgcgggagattgtggccgctacgccctgcggaccggacggccgggtgaatcccgcacttttgtatgcgctgaaagcctccggcgcgacggaaattgtcaagatagggggcgctcaggcgatagccgcccttgcactggggacggagagcgtgaaaccggtggaaaagatttttggtcccggcaaccgttttgtggtggaggccaaacgccagttggtgggagctgttgccattgatttgctgcccggacccagtgaagtaatggtgctggcggatgatactgcggatgcagagtttctggctgccgacctgctggcgcagggcgagcatggcccggacagcgtagttgtttttgtcactacatcagaggcgttattggagcaggtggaggcggaagtggaacgccaggccgccctgctgagccgcggatccatcatccgggaggtgctggacaagcatgcctacggttttctggtttcttccattcaggaaggggtggaactggttaatgcctttgcgccggagcatttggtgcttgtcactcgggatgaagaggccgtgcttaatggcatcaggacggcgggcgccatctacgcaggctccctttctactgtagcctgcggggattttctggcgggtcccagccatacgctgcctaccggcggcgccggcaagtctttttccggcttgcgggcggaccagttccagcgccgcaccagcgtggtgcgcatgaaccgggatgccgtgctgaactccgccccgtatgtggcggagtttgcccgggtggaggggctggacgcccacaaccactccattcaggttcgcgccgcccgcgtgaaccggtaatcccggaattttcctcaatgctctccatgatgcaacagcagggaatcagggaacggttgcccgttgcagcagatctccttgttgccggacatggctatatgggcgtttcccggcatcatgggggtggagtgggggccgttgctgagagcatggtagtcggcttgccgacccgtttgcgagatttgtcgggatggaacgctcatcggatgggcagtttcatccatttgctcggaaatcccgcgtaatcgtttcaccgtattcctcatgttcaagtccctcatccgcacgtttgccattgtggcggccttcatcgcagggtatatgatgcccggcctgcatgtgtacagctggacattcaagtggatgctgatagtaatgctgtttgtaacctttctgggcatccgcttcaaacgaatgaagccggaacgggctcactggctcctgacgggggctaatctgatggtcgccctggcggcatggggtgtgtgccgccttgtttttggggatgggtatctggcacaggccgcttttttcgtaggcatcatgcctacagccacggcggctcccgtggtgatggggctgctgggcggcagcgtggagtttatgctgaccgcccttttgctgattaacggtattatctgcgccttgctgcctttcatcctgccggcggttgttgggcggggcgattttgagatttatctgaacgtggcccagaatatttccttggtaatgttgcttcccctggctctggcattggcggcgcggcgtttttatccgcgcgccatcgcgtggcccaggaagttgaaagacgtcacttttggcatttgggtggtgattctggttttgatagccgcaaacgcctcttatgatatttcctcccgtgagggcatttcggaacgtgttttggaacagattggcgtgattgccctgctggtttgcggagtcaatttcgggttgggatatttgctgggggggcgcacgcgcgctgcggagtgcagccaggcattagggcagaagaataccactctgtccatttatctggctttgacgtatgccagccccattgccgctctgggccccacgttttatgtactgtggcataatttatggaatgcctggcagttgtaccgcgcgtccgaacgaaagcgcagggatggatgaggaagggggcatccgtttcggcggaaatccccggcagaattatggggagttccatggtcggaaaaacgggagggagggttcttttgagccggttccaagtgacggccggcagactgttgaaggttcttttttatccactttcaggaacggcagaggagttctccccgagcaaaaagcttgaaattcggggaacgcccggtaacgttatgcacttgttatgcaggcgtcttctcctttgccccctctgtctccgcgtaccaagtggctgattgccctgtgcttgtgcgtgcttgtgatgctgctggagttcctgacgtaccacatggcgtaccgcatcggctatgatgaagggatgctgactactccgccggtggtggtgcagaaaagcgatgaaaaggccatgcagaatttgtcccgcttcatggcggatgtttttgcttcgcgcgagagcctggccggcattctggacaaccgggaggaacgccttgcatggatcagggatccggaactgcggacagaaacggcctggggcctcacccgggagctgattagccggggtggcgtcgttcctgctcttcctgcggccagggaattaattgacgccggatacgccgccgggcgctatcaggtatgggctccccgtgcggatgccgtggcaaaggctctgttggcggagcaccagtacacttccgcctacgattatttgaaaaccgctgaggagggatatgagaaggaaggaatggctgagccgctggtgcggacgctccagaccatgagttccattgaccagatgctgaacaggaatgaacaggctaatatgttgctccagcgtgcggtggatgccgctgcacatctggggccggatgccctccctgtcaggtccaggcttttagccgcccagggaaggctggcacgtactacggggcgcattccggaatcgcgcgagtatttcaagaaggctctggctctttgtcctcagccggacaagaccactggagacctggccctggccagcatcagcatgggggaggccatgttggaagccggcaggaaggatgaggcacgggaattgtttttaaagggcctttccggctcggaaaatgcctcttacctgttgaatgactgcctcaatgccctgcgcggtctggcccgtatttctacggagcaggggaattatgaggaggccctggcttatctttaccaggcggaaggcgctgcccgcggcgtactgccgacggaccatgccttttgggccgggttgtatgatcagagggggtgggtcaacatcttgcgcaaggcctctccggaagcccgggcggattttttaaaggccattgccaacagctcggcttctcccgtcatttccgcccagtcccgcgaagggctgggcaaggcatggctggatgccggggaggggggcaaggccagggagaacctggaaaaggctcttcagctgcggaagtcccatttcgcctcggatcttctgtccttgggccgcgtatattattccctgggacttgccagcgatatggcgggggacagggagggcgccctgactgcctatgccggagcggtggattctctgctgaaatgcgtggagggggcggaacgcagggatttgctggttcagtcttatttgtgtaaggcgtacgctctgtgtgacggagaacaatggaaagaggcggcagaagcttttgaggcggttcttcccatgctggagggggaacagaggtcggagaattacaaacagcttggacgctgttatgacgaactgggcatgaaggagaaagcggatgactgctggaaggaatccggttttccccgggtgcgcatggcatcccccgggcgcagaccctccgtgaactccagatcttcacggaggtaggatgcgaggggcttcgtaagacgttgcgaggcgtttattttgcttgatttgtgccgtctttttggctcaatgcctgcatgagttccgagcgccatttttccagtaagccctaccgccccgcacgcaagaaaaagtcttattggaagccggtcctctttttggtcctcctgggaggactctggttcggctacatccagtactggcctacgatagaagggtggttcaagccgaccattcatgaggtgcacagccagacgcaggccatggggcatttgcaggatatgctggcttcatggaacggttccgatgcagagctggcgcagatggcatcctccgtggacaagcaggtggaatggatgaattctcccgaagccagagattcctttgcatggcttttggcggtggaaatggaccggcgcggcatgctgaaagaatccgaacctatgctggctgctcttctgggaaaaaagctggctgcttcctcctccatgacggcggaggacaatacccgccttctgggcgtcagcctgaactgggcgcgggaattcgcccgccgcaagcatgatgctgtggcggaaaagctttatgaagtgattttgaaaaatacgccggaagaccaggtttccatccgtttagcgtgcttggagccattaatccattatgcgtacgaccaggccaggtttgagcgtttttccgcgttgtgcaagcaggctgtttctcctgtcatgaggagcatgctgaataaaccggaggatgtgaagagcatggtgaaaatcctgttgcttcaggatactctgccagacaggaccaccgggttgcccggtggcacggggagtgcgattgcccgggagcttcttactaaattccgcctgaccgccaatccggacatgggccgcattattctgaatgaactgaagatgccgctgaacacgcgccggaagtattcccaggaggaattgaaggccatggccgaccagctggaagcggctctgatctgcttccgagcagctgaaacggagatggactgcacgccggagacaatgcttgccctggcacgggtaaggatgcagatgggggatttgagagaagcctcccgcctgctgtcccgtgcagaaggggctgccatgacgcttggcgtggatgctccccgtattttgagcggctccagcctgagccaggatattgcgtccatgcggtcccagcttgaaaaatacagccaggcagaggctttggtgaaacgggcttatgaagatgtgaatgttgccgcagctttcctgaaggcgcgggattacgatcaggcggtaaagtatctggaacaggcaatgaaagtggctcgtgaaaataccacgtttgttcaggcacttcagccggtcattctgaatcttcaggcggagataagcgccggcagggaacaatgggctctgtcggagtcccaatatggaaagttgattgcggagtgggatgcgttgactccggaagataaggaaaaactccggaataatctggcctccatccagttgggagagctttacaatgaaattcaccgcaactgggctggtgtgtgcctcaagcaaaaacgaaccacagaggcccgcagggtgctggggaagataggagaggttccggctgaagaaccggagaggcctgcctcgcgccgacgccgcagatagcagacccttccttcagttaggccgttccttttttggaaaggaaaagttatccattggcagatgccggaggggctcagagttcccagaggctccggtcgggagcttgactaaagcgggatacctgcggtcagctgcgtgaggctgaaggggctttttaaggaaatgtgccgctttaatcccttgacgtcatcaaagagctttggcacaggttccgtttccctgtatcgacggatacccggcattccggagagaaagaatggattttaggccttcaacaagttatttgtctctttttggggcaaatgtaacgtttccggtatgatccatattctcaagcagagctgaaaaacagcttctgcagaaccttcagctgcggactttggctttctgtcttacatggctgagagcccttttcccatgaaccattttttcacggcggtcagctgcggattgacggcgggagcgcacagtatattttgcgaaaatttggctaaccgtaaggttgccctgttcgaaaagtttgaaaatattatctctcaccctcatggcttcctgaagcgctgcgtcagcgcccccgtattgagaatcggagaaataacgggtgaataaacgcttgttcttacagatcgccaaccgatagccctgaaaggccgttgtttcgtaagtgtaacgggtgatgtttttacaaggcatatgaacagaagttatgggaccgggtgatagaagcagtgataagcttctattagaataggttccatttcctgtaaaatccagaaaaaacacaatttgttagattgagtgcaaaaaatgcactactagatgcttgtggacaggttattgtggcgtgtcatccctgacataaaaacaaccgtcggaaacacggattttcaatttttcccctgcatgcacctggtttgtctgccggataagctgcttatcctggttttctaccagggcatatccgcggcgcagggtctgttccgggctgtgtgcttcaagacgtgcttgaataagagtgagttgtgaagataaatccgtcatgcgggaggcggctgcatgggataaaccggcctgaagggaagccagaagctgtgtgcgctcccggttcctgtgggcggggtggcgcatttgcagctgatgttccagtttgttaatatgcagcgtgttatgaaaaactctcgtggttgcggcattctgcagggtttcttccatatcgtccaggcgctgggaataaggagagagcagggaatacgcatccaacagcttcccccgcaggtaaacatccagtttcagcttggaacgcaagagggaatgccgagcggatgcatgaagagcctgttccattctggacagcttgcggagccattcagggccgtccggtgtggccagttctgcggctgcggtgggagtgggtgcgcgcagatccgccgcaaaatcggcaatggtgaagtccgtatcatgacccactgcggaaatcacgggaacggtacattcgtaaatggcgcgcgccaccgtttcctcattgaaattccacaaatcctcaatggagccgcctccgcgtcctacaatgagcacgtccacgggcgggagaccgttgaagggcgctccggaccaagcgcgcacggctgcggctatttcgtgctccgctcctgccccctgcacgcgtacgggcagcagataagccttcacccacggggcgcggcgttccaatacgtgccgtatgtcctggatgacggcgccggtgggggaggtgacgatgccgatggcgcgggggaacgtgggaattttctttttgtgttccgcgtcaaacaacccctcgcgctggagtttggctttcaactccaaaaagcgagtctgcaaatctccctgtcctgcagcttttacctgcctgatgaccagctggagttgcccccggtccgggtatacggtggcgctgcccaggacatggactttcatcccttcctggagccgtatggggcatttggaagccgctgccttgaaaaaggcgcagaaaatttccgctccctgttccttcagggtgaaataaacgtggccgctggtgtgatgcttgacgttgctcagttctcccaccacccactgggtgcccacagcgatgctgaccgtgtctctcaggcggtaaacgagctgtttgactgtgatgggtttgggcgcggcgggcgtttcctccgggaattccataaattacggttcaaaggggatgttcagcgcttcatacgctagcatcctgcattgcttgatatccagcttgccggatgggagcaccgggatgcgttctacgggaataatctccttggggcaccagagggccggcagcccctggtcaatcaggccgtgcctgatgagggtgcgcgcctggtgcacgtaatccgtcaccagggtggtgagcagggctacggcctccccttttacggggtccggaatggtgacgacggctatccgccgttcttcgtccgccggatccagattccaaatgttcataatggctgcttccagggcttcatgaggcaccatttccccacctattttggaaaagcgggaaatgcgtccttcaatcttcaggaagccgaattcgtctgcggaacctatgtctccggtttttagccagccgtccacgaaaatatcgcgatccgtctccggaccgcccagatagccgggaaagatgttcggtcctttcagccagatcatgccggaagtagtgatgggaaccacgcgtcccgtgtgagggctggtgatgcgtatggcgattccgggaaggagggctcctacggaactctttttcatgccgggaatgaagtctccggcggcattggatggcgccgggtcaatgaagttgacggaacagacgggagaggcttccgtcaggccgtagccttcgcatggaatgatgccgaatttttcccggaaagcggcggaaaggtcttccggcagtttttccgcgccaacgatcaggtagcggacggttttaaaggtgtccggttcgcagcgtttcatgaaaccgcgcaggaaggtgggcgtggtgactaccagactgattccatactgcttgataagggctcccagccgtttggcctcaagaggggatggataggtgaccatgtcgtacccgccgatcatcggataccatagcccgatggtgatgccgaagcagtggaatacgggcaggcttcccagaaacctgctttgcggttccagcgtaatgcgggaggaacattgagagatgttggaaagaaggttgtggtgggtcagcggcacgcccttgggttccccggaagagccggaagtgaacatcagcacggcttcgtccgcgcctgtaggtgcgtccagccccagttttttaatcatgaaccccgctgtcaggaatttgatggcgaggccccagcgtttggcggaacctttaagcaggggaatttcccgctccatgaggatcagatcccgctgggggggccacgggaaattctggagctttcgcatgaaggtatccgcagtaataaaccagtccacgccggattgctttacagagctggcaaaggctccttccgaggcggaataattgaaattcaccggtgttttcccggcgaacaggcagcccagattggctatggccgctcccttgcccggcggaagaatgatgccgacccggcgattcgaggtaatttttttcaacctcttggcaaaggctacggaaatggccagtagctggccgtaagtcagcgtagtgtcgtcaatgccgtcgatgacccggcaatcggaatgaagtctgaggctgcggaaaaggagggcggacagggaaccgtggagctgaggcagcgtggcgtatgcctgggcggaacattccagccacgcggaggtcaggcgtgctgccatctcggccccgggggccagtttggggagaatatgtatctggatgtccgcctgggcgtccgtatcggcctccgcatccagcacggagttcgtgtaaaaaccggcatagaccggtacgggggaaatatgcagggcttccagggccttgatgacccgcggaggaatttggctgatggaacctttcacatgggagacgggaccgggcagaaatactactcttctgccttcgttaatgcgttccatgatggcggaacgcagcgcgacagggtcgctgcctccggcctggaacaggatgccgtccgctttagtggattccagatgggaggcggtggccgtatccggggggagaccttcttccaccaggtaggtcatgcggtccctgcccagttctttttcgaacatcagtagggttttataagatactttgttgaagatcaacagatcacctgagtcggataaattggaggaaccaaaaatggccatgggaaaaggataaaaaatttgcttgaagcattttagcaacttgaagaaccgggagcaaggaggaaaggtgcattcccggttgcttttcctttatccggatcggtctcggaagcctttcccggctcggtacgttttttatgggaagagtattgtttttcatgggattgtctggatttggcgttatctcctgcgaaggcgtttccgcaaaccagctgttccgatatttacttactgatgaatgggcctggtgggcagcaacatcttcggacgagaagcgctggcggaaatccgcgtgaacgcggcgcaggacctgggagaccggaggggggaaacgaacgtctctctgctgggcaaccccggctttgcgcaaagcgtgaggggagcgaaagtgggaacgacggcgctgcagctgggagccggactgagcgtgccggtgggaacgaagggaaccatctacgtgaacgggaacgcggacatccgtgacggggctgctcagtaaacgggacgtatcagctactgctacgatttctggtctttgctccgaacttgctgcgggcaaacaatacaccctctttttctatgtatgaaaggtgaaattcacgaaaggtgttattttgctgcatcgtttgttcaggaatagggaagggatgaaaaataatttttgcgtccatttttattttcatgtgaaatgttgcattgcggattagcaatccgcagaagcattatccagaaaatagaccagaatcagatatttttgatgtttataatgaaagagatatggaatgtttttttgaaaaaattctgaattggatattaagaagaagatgatttccgggtatgcaacatgcattggatcaatgttaaatattgacggcggattgctaattcggtaatagctatatattgcaaacagccaatcaggacggctggatagctttattatttacccatatttgcaagttatgaagttacgtctaccgctcaagttgttgtccgccttattgtcgttttatgccatatccggttttcatgtgttcgctgctacggagtgggacggcagcagatattccggtaatatctatacgtgggtagggagttcgtccaatgattttcataacggcggcattgtcctgaccaatccggatggaacatacggtcctgtcaatacgaattggggttccgtttcagaggagggaagtatttggaacctttttgccaatgaaacgggactgtcggaatataacacattgcgctttgtcgcatcaggcacggaagtgggcgatgtcaccgtatcggcgaccaataaaaatccatcctgctcctttacgccatttaccatggggggattgattgtggaggaaggggcatcagggttctcccttgtcccgaacaataatgcccagaggactcttatactggggagagcgggtacggaagagccggtattatttacggttcgtgaagatttttccctgggttcttcctccaatgcatggggcccggttaatgtgaatgcagactggaatgtccttgtggcaaatggcaagacgctgaatgtttacggggcactgaattcttccggacggaccattacggtgggcggggaaggattcagcggtacgttggttttaaacaatgcggccaatgcatccatgactgctgaatgggtcatcacctccggctctactgtaaggtgcatgaataattccgctttgggaagcggccttgttacgctggatggggggacgcttgattttaactcgcaaacgatcggatcaaccattacgttgaacatgagcgggaccgggacattgcagaatgtgacagttgatggagcaattttatcttatacgtcttcatcgggaaatgatgggattactgcttcaaataccacgtggacgtccgggaaaatagatattgggcgtttgttgcagggatttagtgccgaaggttccaataccgttgatttgggagcggagcttggcgagggctttagcgtactaggcttagatacagggcaatacagaatagaaggcagcgtgctgacgatagaagacggggcgatatccagcgtgacgtgggtatctgcgggagaaggaggggaattggaagaaacggtcaagaacgcctttacgctggctcttggggaggggagtgcggccaacgtcagcctgggatatctgaacgggaccctgacgaccagcggggacaaagtctatcaaatcaccaacaccggcggaactaaaatcaacctgtccggggtatacaacagcggggcgaccctgccgtccggcaacctcaactaccagggggacatctggatggacatcaacggaggagcattcggcatcatcgccggaggtgtcaccaatgaatggggcaccaacctccagaccagcacgctgactggggacacccatgtgcagctctctggaaacgccacggcggaacacgtcatcggcgggaacaacaagggagcaagcactaccctgacgggaaacaccaacgttaccgtcaaagataacgccatcgtggcgggagccatcatcggaggaagcacctcctcccacaatgccgtcaccaccatcacaggaaacacgagcgtcctggtcaccaacatccagcacagcaacagcgcgaccgtcaacctgggagacttcggcaacgtcacagcccaaaacttcatcacgggcggaagcgcgtggacggccaaccagacttcaggaacgaccatccagggcagcacctcggtaacgattaatgtaggcgatgcggaactctccggcacggaagggcacaacaacttcgtcaaaaacatctatggaggcagttacgcaaacacgaaatccgagggcaacggagccgtacaaaaagtggaaggaaactcaagcgtctccatcagcggaaaagaaggaatcaccttcacgggagacatcatgggcggctccttctggaactggggcaacggcacgacgctgaccaccaacggaaacaccagcgtctccattgacggaggttccaccttcacgggcaaaatcgtgggcggctcctggagaggaagcacgtggacggcggaagatcccacagccctgcccgtcagcattggcggcaacatcaccgtcacccttggacagggcacctacctgggagacatctacggggcgggcaactgtggcacggtaggaggcgaagtccacgtctcgctgacgggaggaagcatctttggggaggaaggagaagaaagcggcatcaccatcggcggaagcgccggagcggcggtagaaggaaacaggacgctggaactcaagggaacctttggaaccggggacttccaaaacgtcaccttcacccggtttgatgaaatcaatatcgcgcagaaaggaacctcggccaccatctacgcgctgaccgacagcccggccctgaccaaaacgggagcgggaaccctgacactcggggcggacgcggcaggagcggaaaccatccttgacggaaccacggaaggaatcaccatctcggaaggcagcctgaacctctccggcgccggcggcagccatatgaaaggaacgtggaacatcgcctccggctcccgtctcaccggagtcagcggaaccgtaaccgtaggagaaggaggcctggacggactgaccatcgccctgggaacggaaaacatcggccaggacacgcaggcgtctggcgccgtcatcagcaacggcagcggaacgggaagcgacccgaacctgtccataaagggggaagggctgacgctggacctgagcaacgacgccgtcgtcaaccttctgctggaccacaaaaccgacgactcctccagctacctgaccctgaccagcggaacgctgaccgtcggcgacctgggcgacatcgccttcactaccgaccttctgtccaactacggcatccgggtcaccggaacggacggaggcagcctggtgctcagcggagcggccaccggcctctaccgcgtgcaggaggaaggaggaaacgcccatgaagtcaactcctatcaaacgctctccggctacgccggcgtcgtcatcggcggcggccagaccctgacggtcaacctggccggagccccgggcgaatccgacggacagggagctaaaatcaacaacctgatgggagccacgggcagcagcctggtcgtcaacaacaccggagacggcacggccgtcgtcatcctcaacaacaaacaaatgacgacgggagaagacgacatcgacccggccggccaggacaccgtcatgggcggcagcatcacgggaggcaacaacgtcgccttcatcaaggaaggaaccgggacgctgacggtcggaggaacgatggacgtggaaaccctcgccctgcgtgaaggaaacatcgtcctcaacggcgcgtcaaacaccctggacaccctcactctggaaggaggcggcctgaccattaacggcaacgccgaagtcggaaccatcaccggcacggaagccggaggctccctgaccatccagggaactctcaacctgaccggaacaggcgaaataaacgacggctccatcaccggaaccggcaccctccgcatccaggaaggagcggaactggccctgggcggagaagcccggctggacggaacctcagtcaccgccgacggcacgctggccctctccggaacggaatccggcaccatcagcagcctctccggcagcggcaccctgtccatgaacggaggccgcctctccatctcctcggcaacaacctcctccggaaccttctccggcacgctggcaggcagcggcaccctggacatctccgggcaagccacccaatacctgcaaaccggcaataaggactacgacctcgccgtccgtgacggaggcgtcctggtcctgaaaggcaccgcggacgcccccacgctgaactacaacagcatcaccgccggaaacaacggcaccctgcgtattgaagccaccggggacgcccagggcagcgccaacaccacgctcaacgtggaaaacatcaccttccagaacggctccacgacggaactgatctacaacttcaaccaggacgccccctttggcgcccccatgctgacggcgggcaccatcaccgtgcaggacggagccggcttcctcctctccaacatggaaggaaacgccgccatgaacgcggggagcgacctccatgacgtcgtcctgatgagcgccaccggcagcatcagcggcctggaagacgggcagagcctcgccgcccggatatccggcctcttcgccgtctactaccaggacgccacgctgagccgcgacggaaacgacatcctgctcaatgccacactccggcaggaaaacctcttcgcctccgcggccgacacgtggaactccgccgccggagccagcctgctctgggaagcccgcaaaaacctggaccccgactcccagctggcccaattcatgaacggcgtcagcaccatgatcaatgacggcaacctctccggagcctcccgcgccatggcggcggcagctgggagcacggtcaacgcgcttgggacggcgcagagggacgccctgcgcgaccagatgggctggatcaggaaccggaccaccctcatgggcgtcaacccggcctacgtcaacgacgacctcccccgcttccacatgtggatggaaggcacgggctcctacgccaaactggacacccgcggggatgaaagcggctaccagctcaccacctggggaggcactgtgggcgtggacgcggacctcagcgaccgcctcacggtgggagcggccttcacggccaactacggcgacctgacggccagcgcggcggacagcgccgacgggcacctggacagctactacgccagcctcttcggccgctaccaggacaggcgctgggcgcacacgctcatcctgacgggaggatggaacgacgcgaaactcaaccgtacggtcaactatggggaaggaagctacgggacgcagggaagcaccagcgggtggggctttggagcgatgtatgaactcacctacgacgtgtacctcaacgaaaaccgcagcagcgtgctgcagccgctgttcaacgcctcggtggtgacgacgcggatggacggctatgaggaaacgggtgcgggcaacgcgggcctgaacgtcggcaggcaggactggacgacggggacgctggcgctgggcggccggtggatgggcctggtgggcagcaacatcttcggacgagaagcgctggcggaaattcgagtgaacgcggcgcaggacctgggagaccggaggggggaaacgaacgtctctctgctgggcaaccccggctttgcgcaaagcgtgaggggagcgaaagagggaacgacggcgctgcagctgggagccggactgagcgtgccggtgggaacgaagggaaccatctacgtgaacgggaacgcggacatccgtgacgggtccagcgcgctgaacggaagcatcggctaccgctacgacttctaacaagaaagaaaacacaaggagggggcccccacccccgaaaggccttcctcctgaccctccagagccgttccggaattattccggaacggctctgttgcttaggggaatcccgctaagccgataaggtgcggggaggtagtttttacaatatattggaatgatttttattaaaattgttttttcaccgcagtcgcttgaattcgtaaagcggattaaaaattcgccgtgtaatgggaaccgggccaatataccagagttgccccgcctgtttgcttatactgataaggatagaacgatgaatgcccctgattccagaccagataaagcatggaaatactcttctggatgatgcgcaacacctacggaatcaatgtttaagcttgtaggaggatttttaatccgctaatgatggtaaaaagcctcctgtcagtttcgggaggaatttcacgtacgcccttttaaaaactatgaagttgcacctccctttaagtcttttgtcctccctgcttgcctgcatggctgctgtttcctcaccgcatgccgttgcggaaacttatacatggctgggagggacggtggatgttcatttaaatactaactggactccggattacggcagcagcaactggtcggcaacatgggccggaacggcgacaaacagcatgcgttttgatgcgggtagcatgacggggcaggtcaaggctctccaggcttctttcaatacgctttcacttgggggaataaccgttacggataattccgatggattcagcgtttccaaaagcaacggctccaaccgcaccgttaatttacgtgatggaggagaagggtatacgctgtttgacataggcggggatttttctctgggagttgccagccaggtatggaacggagttgttttcaactccagtgccctgtttaacattgcctccggcaagaccatgaatatttacggtggtctgggaacggctggaacgggagccaggacgatgacggtggggacggacggttttgcgggaacccttatcctgaatacggctgcccagtcttccatgacggctgattgggtcatttcccatggggcgaccgttcaactgaacaatgccgcggctttggggtccggatcggtcagcttaaacggcggcaatataacggcccagcacgatgctgtttataacaatgccctggccgtgagcggttcttccggcatgaacgtgaatgctgccacgcggtttgccagtgtcagcctttccaatgccgctgtcctgaacatgaacggagggacgcttggcattgcgaatgccggcgttttgacactgggttcttcagggaccattacggggaatttgacgctgggaaacacgtctctcctgaatttttccgctcttccggcttccggatcatatttgcttaatgtaacaggaacgctgaccgtgggcagtgaattgcttctggggcaggaaacgatggaaggcgtagcctggacggagggttcctacagtctagttcatgcgggttccgtagagggagtccctgccagctctttcgttctgggcgacaatcttctgggttcatggagcacggaaaacaataatcttaccctggttgtggagcaggtggctttgcttgaatggaaaggcggcgacgggatatggtctgtaactgctccggcttcttcaccgtggaaaaatgaaggtgtgtacaataatgcttccggagtggtcatgggagatattgacggaagttctctgcaaacagtaaccattgatggagttgtctctccctcaatcatgatggtccaggcggatacgacggattatgtgtggaatgccgcagatgaaggaggtgctctggaaggcagcggtaatctggagaagaccggcagtgccaagctgaccattaatatggataatgctgattatgccggaaaggtcattttggggggtggaacgcttgaaatggggaatgatgccgctttaggcacaggtgatctggcatttgacggcggtaccctccggtatggaacaggggtaacggcggatatttccgggcagatttccacaacgagcaaaagttccgtgaaagtggataccaacggtaataacgtaagctgggcttctgcagatcattacaaggctctgaacttggaaaagtccgggaacggtgtgttgactctcggcggcgccgtgtatacggggggcctggcagtagatgaaggaggcgtgtccattacttccggcagtgttcaaacgaagttttctgcgggagtcacggtaaatgcaggagggacgcttgccatttccagcaccattaacggaatatcgaccggagacaacgccaatatcgtcatcaacggcatgagcggagcggggcggattgagctggacaaccaggctgccaaatcccgtttttatatttccggagataattcttcctttaccggggaattggtggcgaccggactgaacaataatccgggaaatacgaatgatgcccgcgatcttcagtttgccactgctgccagtatgggaagaggaacggtaaccctgaatggacgcgggttctggctgggaaccgccaattcggcggataccgccgtcatggcagcaatcaatgttctggagaaaggttcctatctgaacgggggaagcggaaattcctattactttggcggggcgtttaccggttccggcaccatgaccacggctctgggcaatgcgttcgcttatttgacgggagatatgaccgggttccagggagcattctcccacacgggcgattccctgtttacctgggcattcggcagcaatacggaggccgttctgaatgatggaaagcttttcggggatggagtggttttgaaggctgacggagggacaagccagtttaaattctcctacaccaacgatattatactgatgaacggcaccgtaggcgcagaaggggccttgaacgccagggtggaacaggccggaaccggaacgctggtgctaacacaggacaatagcgcgacgggaacgctcaccattaccagcggcacggttcagctgggcaatggagaggcttccggctcctgggcagggcagattaccggagcaggggctctggtggtggacaggtctgcaggttcctctgctctggaactgaactccgccaacgattatcagggtggaactacgctgaacggcggcacagtgaaggcgttgggcgccggttccctgggaactggcgatgttttcgtcaacggcggttccatcctggatatgaacggacaggcgattgccaataatgtcgctattaccaaaggagggctgcaacatgccggggcctacgccacgtcgggcggcgtaaccgtaaatgcggaggctgattccggggacattgacctgggaggcctgtccggcgacaaagtgggaggcatcaataccaccacggcgggaacggccattaccggcctgacgggaaatttgacgctgacggggaataatgccctgcatgtgggggtggaaaataccacgtatgcctctgacggagaccagaaaagtctgattcagttcaatgatgcggctacggggactgtttctttaggcggagattcttccgatctcacgctgcacatggatattgatacggatatcctgattgccatgcgcgaactggattctgtcggtatcctgctgacagacgggacgattaccggattgccggacagcggtctggtggcgtggctcaaccagcatcttacgtttaatgccacactggaaagcctagggttcggcatccagggagtggatggaggaaacattatcatttccggaagaacggaccagatttacattgcttccgtagacggttcctcagtgacggaaattccggctttgaattcctatgctcaggtgattgttgataaggatctttctctaaattttgatgttcccgcatctaatacggacaagaccatcgttcgtcatctttcctccggcaccagcgctactggcaatctggcagtgaatgtcgccggagaaggttccttgaatattgaactggccaacgatttggacgattccgtttttaacggaaatcttatcgtaaacggaaacggtgcggacttggtcaaaacaggagaaaagacgctggtgttgaatgggagtgtcagtacatccaatgcagtgattgccaaagaaggcacactggttctgaacgggagcgtcaacaacatcggcacgctggctttggcctccgcttctgcagatgcaattgcgcgtaccgtgattggtgggactgtcacagccactctgtcggatgaagatgaaggcggttccctggagattgctgcggggggaacactcaagaccgccggagattccgtcctggaccaggcgacctccatttccggagcagggagtttgaatattcaggaaggttccgccctctccctgacggggaaagccggcctgtccggaacttccgtgacgctgaacggaacgctgggtctgtccgggactggggaaaaatccatccagtccctctccggttccggaacgctggcgttgaacggcggcactctgtctgtcacttccgcttccgccagaaacggttctttctccggtacgctggatggagagggacgtattgacgtatccggcagcgtaaccctggtaatgcagacaggaagctctacgtatgacctgggcgttcatggaggggggacgctggtattaaaaggcacttctgccgcccccgcgcttgattaccgtaatgttgcagtaggttctgccggcaccctgcgtattgaagccattgggcatgaggccggagattccaatacctccttaaacgtcggcagcattgattttcaaagcggctctacgacggaattcgtttataatttaagtgcgtctgatcctttcggctccgctatgctgacggcggattccatcaccattggaaatggggcgggattctctcttgccaacatggaaggcaacacggggctgggaacgtatgacaacctggacggcgtggtgctgatgacagcggacacgattgacggactgacggagggggaatccatatccgtggggacttccggcctgtttgccgtttattacaaggatgcgaccatgagccgggagggcaatcatattgtgctgaatgccacggtgcagcaggacaatatttttacgcctgcggtgaattcccataattccggagcaggttccgaacttctgtgggaggcaaaaaataatctggatgccacttcccagcttgggcaggcgatgcattccatcagcaccatgattacgggagataatcccgacttggcgggggcatccagggctttggcagcagtggcagggagcacggtcaacgcgcttgggacggcgcagagggacgccctgcgcgaccagatgggctggatcaggaaccggaccaccctcatgggcgtcaacccggcctacgtcaacgacgacctcccccgcttccacatgtggatggaaggcacgggctcctacgccaaactggacacccgcggggatgaaagcggctaccagctcaccacctggggaggtactgtgggcgtggacgcggacctcagcgaccgcctcacggtgggagcggccttcacggccggctacggcgacctgacggccagcgcggcggacagcgccgacgggcacctggacagctactacgccagcctcttcggccgctaccaggacaggcgctgggcgcacacgctcatcctgacgggagggtggaacgacgcgaaactcaaccgtacggtcaactatggggaaggaagctacgggacgcagggaagcaccagcgggtggggctttggagcgatgtatgaactcacctacgacgtatacctcaacgaaaaccgcagcagcgtgctgcagccgctgttcaacgcctcggtggtgacgacgcggatggacggctatgaggaaacgggtgcgggcaacgcgggcctgaacgtcggcaggcaggactggacgacggggacgctggcgctgggcggccggtggatgggcctggtaggcagcaacatcttcggacgagaagcgctggcggaaatccgcgtaaacgcggcgcaggacctgggagaccggagaggggaaacgaacgtctctctgctgggcaaccccggctttgcgcaaagcgtgaggggagcgaaagtgggaacgacggcgctgcagctgggagccggactgagcgtgccggtgggaacgaagggaaccatctacgtgaacgggaacgcggacatccgtgacgggtccagcgcgctgaacggaagcatcggctaccgctacgacttctaacaagaaagaaaacacaaggaggggcccccacccccgaaaggccttcctcctgaccctccagagccgttccggaattattccggaacggctctgttgcctgaggaaaacccctgggggcggcccggatgggtcaaaaacaaaacagcggcaagaaaaaagaatgcgccgtccccacgaaaaccatggccctttttcccctcgtcccctcccgtgaaacgcctcatcctctcctcaaatctgtaaaaacgcgccaaatgtttccggaagccctctccgctgtccggagccggaaaagaacggaacgcgagcaatagggccttttttatgcgatttcagcggttttccattccaataccgcttccgcccgcagttcatctccgtgcatgaggtggtgggaggtgagggagtcccggaagaacagcagggatttcatggaatctcccgcatgggtttcttttctgaaatgcaggtgaattcccgtcagttggtggttctttagccaggagtccggaagggagtccagagcccagaccaggtaggcggcattgttgatgtggcggttgaaatccgtatcccggcgttccgccgtccattccctgatcatcggcagaagtcccgaaatgtccatggataccggagccaccgtttctttgcatggggtattcgggaaagagctgatatgcctgtttaatggcacaggacgcctgcggcgtatgtcaatgacagcccacagacagcttgctgcaacgatgcagttgccttgggcatccctgatttccaggttgcggcgcgccagcagaggcgtttcctgggccgtccaggttcggagttccaccgtttccttccaccggggaaggcggctgacggccgcatccatgcgcacttccacccaagccaggctgcgggacgttacgaaatcatagccgaaacccaggcaggaggcatgggcttccgctatttcctgaaaccagtgcagaaccgtttccggtttcatcaggccattcgcaccgctttcgtaagtgcggacggttgcctgaacggaatagatttccttgttgctggcatgttccataacatcttatgctagcggagccgttctttcggagccagtcaaaaacgggtaatatccggctgtttggcatgccgcacccccggtaaatgaatggccccgtaatttccgggctgtctgccgtggggcatggcatgcaatagaaattttgtcagcagccgctgagattgacttaccttatttctagagaatgctccggaaataggcgatggtcttttccaaccctttttccagcgtaatatgaggcttccaccccagcttttcttttgccagccgaatatccggtttgcgctgggtcgggtcgtccaagggcagagggcggaatactgttttggaagaagagcctgtcatttcaatgactttttccgccagttccagcatggtgaattcctctggattacctaggttgaccgggccggaaaaaccttccgtatccatcatgcgcaccatcccctccaccagatcgtccacgtactggaaactccgggtttgtttgcccgttccgtaaatggtgatgtcttcccccttcagcgcctggacgatgaagttggagactactcttccgtcgttagggttcattcgcggtccgtaagtgttgaagatgcggatgatgcgaacgtccaccccgttcatgcggcggtagtccatgaacagggtctccgcgcatcttttgccttcgtcatagcaggagcggacgcccacggggttgacgtttccccagtaggtttccggttggggatggaccatgggatctccgtatacttcgctggtggaggcctggaggattttggccttgcaccgtttggcaaggcccagcatattcagagcgcccagcacggaggtcttcattgtgtggatggggtcaaactgataatggggaggagaggcggggcaggccaggttgtagatttggtcaacttccatgacatagggaacggtaacgtcatggcgtattacttcaaatccgggataatccgtcaggtggaggatgttttgtttgctgcccgtgaagaaattgtccatgcatataacttcatggccttccctgagaagccgttcgctgagatgggagccgatgaagccggcgcctccggtaatcaaaatccttttgctcatgatggcatgtccatgcgtttgttcgttccgccgcgccggaagggaagcaagcggaaagttttcccctgtccgtgcgttgcggttcaatgtcacatatccgtcacgggaaggcaagcgcatagcatcccggacgggatattacagggatgtccgggaaaggcaggggaggaaccaggaaggtttttccgtacggaccgggaggcgaattccggttggttcccggctgtcccgctggcaggttcaggatttgggaatcgtcagcagaaagctggctccccccagggtgccgaattccagtttcaggtctccccccagggaacgtgccgtatcccttgccagcgccagccccaggcctacgccgggtttccggctgttggtagcgtcttttgtgcgccggaagggtttgaagacaagcttgcggtttttcggggaaattcctgggccgttgtcgcggaagcggatgacgatgttgtggcggtccgcctggacggtgagctggactttggcgttttcccccttggcgtatttaatggcgttggaagtcaggttgtccataatctgctctacggaaacggcatccgtatgaataggaaggatgcggatgggctgggccagggcaaaggagaagctgatgtccgcctcccggaggcggcgttctattttttccgcaatgggttcaaaaagctcctgacaggtgagcgtgtcccgcgcgcggcgaatagcgttccgctgaagccgggagtaggagagtacgttttcaatcaggtgttccagacggcggcattcccgctgcatgttggcatagtattccggctttttctgttccggcaccatgccgtcttccagcatttccgtgtacagggagaaggacgtgaggggcgtccggagttcatgggtgacggcggagacgaagtccccgcggcgctgttccaggcggaaggttcccagcatgagccagatgaccccagccgcacccaggagcaccatgctccagatgagggtgagcgtccaggtcagcatttttttgtggtcctgaagaggaacggctccggtgtctcccggaaggaaaatcagaggggcgttggcaaaggggagtgcgcccgcctgccgggtttcctccgggggcggcgaggacgggtcgaaggttgccagacggctgtggggaagcagcatctttacctggccgggcaggcgtctgttcaggttgtccatgttcatcagggccccctgcaaataaatgccgcggctggtgtgcacctggcgcaggatgtaaaggttccctccgtcttccacgggaacgaaggaagtgacagtttccacttgtgccggagcgccggataccgttggctccggttccggagattcatgcagaatttcattccggatatccgtccagaggtttccgctggacggaacggaggtaagggaggagaccttgccgttcagccgctggtaaaggtccttctgttcattcagccgcccggcaagctccgggggaagagcggggccggttacgcgcccggcaggggaaatctgaatgaaggctgtaacgtagtccggcaggtaggcggcgagattggaaccacgggttgcttctccgggggccggggcgcccatcctcaggtcataggggcgtttgtaggcgtaaacgggctggtattcaaaatagccgcgggcctgttcgaatgtgatgaaggaggtcagaaggcggtccatttccagcttggcttcatgggccagggcttccaccctgatacgctgttcggaatggcctgtttcttccgcctgcaccagcagaacatgggtgagccatccgagcgtgccgatgaccagcagcaggctgattgccagcagaatgatgcgtatgcgccggttcacggatcaggaaacgaaggatgaattccagcggtagccctggcttctaagcgtctccaggggggaggcggaggcggccccgagcttgtcccggagacgcatgacggtcatttccacggagcgcgtatccgtcaggcgcgggtccacgtcccatacgcgccggagcagttcgtccctcgtgataacgcggttggggtgggtggccatataggtgaggaattcgaattcccgcgcggtcagggaggtttccctcccgtctttaaaggtgatcaggcggttggcgctgtccagggtggcgccgggaatcctgatttcccggagctggcgcggtcgttccggagacctgcgcagaacggcctcgatgcgggcgagcagttcccggatgctgaacggcttgacaatatagtcgtccgcccccagcttgagcccctgcacgcggtcttcctcctctccacgggccgtgagcatgatgacaggcgttccggggcgttcctcagacatgacctgcagcacctggaatccgtccgcgcccggcatggccacgtccagcagggcgaggtcgaaattgcgttcccgcacggcatggatggcggccaggccttcttccagagccagcacttcgtagccggatgcggtcagaacgtccgtcagggcatgcctgatgctgtcgtcgtcctccgcaatcagaatggtataggctgaatcactcatcgtttgattctataaaaccacaatatttcccctgttgtatagagaaacctgcgccctttcagtaacaatgccataacaggccgtcttcccgggggatcctcagttatgccggagttcccggaaagggggaggaaggctgccggagggaatttcaatggcttccatgggaccggggacaattccttcaaagaacggcgtgcctttgtaggaaaggatgattttggaatgcaccatgccgcccgtagtctggcgcaggaaatccgcatcccggaagaccaggagcgtctttccgttttccccgggtacaggacggcactggaagtcgccaagcggtgttccgtcagccgccgtcatctggacgggcagtatataggcttccgaaaaagaaggagcgtaaacaccccagaaggaagtgagcgccataacgacgacgatcacgatgccgacaatgattttcgtggaggtggacatgcggagggcggtgttctgaaccgtacgtccacctccggtacggtggccgtgcggcgtcagcgttgttgaagccattcggcggcctggggggcgtaatacgtaaggatcatatcggccccggcgcgccggatggatattagagtctccagaactgtttcccgttcatccagccagccggaagctgcggcggacttgatcatcaggtactccccgctgacatggtaggcggctatgggaagggtcacctgcttccgcatggcggccataacgtccagatacaatgtggcgggtttcaccatcaggatgtccgcaccctcagcttcatccagctgcgcttccctaagggcttcccggatgttgccgggatccatctggtaggtttttttatccccttccttgggcgcgctctccagagctccgcggaacggcccgtacagagcgctggcgtacttggcggtataggccatgatggagacatcgtccagggcttcggaatccagggtggcgcggatggcggccacgcggccgtccatcatgtcgctgggggagacgatatccgccccggcatccgcgtggcacaatgcctggcggcagagaacctccacggaatcgtcgttaaggatttccatcgttccgtcggagcggaatcccaccaggccgtcatggccgtcggaattgtagggatccagggctacgtccgtcatgacggtgatgcctggcacttcgcttttgagcgcgtaaatggtgcgcgggatgaggccgtcagggttgcaggcttcgcaggcgtccggcgtttttttctcatccggaatggctggaaaaagatccagcgtccggatgcccagatccatcaggcgtttggcttcctccaccagtcccttgacgctccagcgcgtgcagcccggcagggaggggatgggctggttcccggtcccttcatggacgaagacgggatagatgaggtgttccggggaaagggaggtttcccggataaggccccggatgttggcggattttctgttgcggcgaggccgtatcggtagattcatcatggtgtggtaatgaaaaggtttttaggaaggcatggcgttccgggacggatatgatcagggagccttgggggcctccagttccagcggctgttccgcatcggccccggcgagcatccagccgccgtctgtttggatgaagtgcaggttgttgacggagaattcatttccaactgctgtacgcacgccgatggtggccttgattccggcgcagccgtctctggcggcgggaatatacgccgctttgacttcgggaacgtcttttccccttaccctggtgtgcggggtgggaatccttcccatgactgttttcaattgggagagcgcgtcttcaaattccttcacggaggcgaagttggacggggccagcatgcgcatcatggccaggctgtcccggttcgccagggcgcggccggcggcggttacggcctcttccggcgtgggaaaggacagcggaggatacgtccggtggaaatccgccatgatgcgggcggtggtggattcgtccggtttcagattccaggaagcgaaagcgtccgtcaggttcatcttgaagacgggaaggccgtctgtgggatccttggttttttccagcgcatagcggtaaatgagagcgggtttgtctatgtccggcatgctcatgcgcggcggcaggatggtcatggctccgatgctgtggatgtccttgccgttcttcttcgcgttgtttttattggcttcctcctgctggtcttcttcacggctgttcggggccatctggtcgtccggatgggggctcaggggaaccaggatagtattcggaaaggtcatgaagctgaggtgggtaggctggatatagcggttttcctcccttctgtcctggaggcgcatggccttgaccacgggaatgaggcgtgcgctctgggtaatggcggattccgtataatacggggaaacgagcagggcggcgatgagggccgggtcatcccccttcacggcccggatgagcaggttcttgagttcgtcgtccgttgttcccctgacgttttcctggcggaaacgcttgatatgttccagggcggctttaacggcggctacggagtactggtgggcgaggccgaaaattttcttcttggcctccgaggatatttttttcgctttctcacggatgccgtcctcaaagggaagaaatgtgttgtcgaagcttccgggagtcagggaggccttccattggccttctttcttcaccagggccacggcggtggccgcataaacgtacgggttggccttgtccggcagcaggatgtaggccatcgccaggtcgccttcggcaatgatggagtcttcatccacaaagggcggacgttccggggccgctccggtgacatacccctggaccgcctccatgcgggaaaggatgcttttcagcctgagttggcttacaaagggggaagtggcgggcaatgacttgtacggctcgtgtttccagtccgttttttcctgaagggcgcggagcagcagtttggccgcgttcaacggcgtgctctggtccggaacgggtcccgtggacggagccttgtttcccgcagcctgatccatattgatccggaaacggacaggagcgccttccggcggctggccgccccgggaaaacccgcagcagaggcagaggcagaaaagggagagggggaggatgttcatgaccgctggccgccactatggcataaacggctgcgggtgtaaatcattcgttgggaatgttgacgcggccgttgccgcagggcggacaaccctggactccggggaaaagcgaacaaaaaggggggaaaggatgcgttccggaagaagaatccgaaagccggaggaaagggctttcccgcggcgttcatgccttgaattttcgggaagaaggtctttttgcatttgccaacagcgtttaagagaggtttactgatgcgcgtatgtccgaacacaaggaaagaaagactcttgaagaacgccaacagatgtctgatctggaacggctgcgccactcctgcgcgcacgttctggctacggccatttgccgcctctggccggatgcccagctggccggcgggcctgccgtggataacggtttttattacgacgtggagctggaccaccgcatcagcacagaggattttgaacgcattgaggaggagatgaaaaaagtggtgaaggaaaaccaggttttccagaaggaagtcatttcccgcgcggatgccatgaagatggcggaatccggggagctgggcgccctgggcccccgcagcgagccttcccgcttcaagattgacctgctgaacgacatcccggaagacgaggagatttccctctaccgcaacggggattttacggacttgtgcgccggtccccacgtgggccgcacgggcaactgcaaggcattcaaaatcatgagcgtggcgagcgccttctacaagggggacaaaaaccgccccatgctccagcgcatttacggcacctgtttcccgaaccgcacccagcttgacgaacacctggaacggctggaagaggcgcggcgccgcgaccaccgcaaactgggccgcgaactgggcctgttctgcattgacgaatccgtggggcaggggctcatcctctggaagcccaagggggctctcatccgccgttccctgcaggacttcatcacggaagagctggacaagctgggctactcccaggtgtacacgcccaacatcggcaagctggacctgtaccgcacgtccggacacttcccgtattaccaggaaagccagtacgcgcccatcccggaacgggacgccatggaaaaactcagccaggagggggcttcctgcgcggaactgttcaacggcctggccaccggcaccattgagggctatatgctcaagccgatgaactgcccccaccacatcaagatttacgcgaatgacgcccactcctaccgggaccttcccgtgcggctggcggaattcggcacggtgtaccgttgggaacagagcggagagctgggcggcatgacgcgcgtgcgcggtttcacgcaggatgacgcccatatcttctgcacgccggaccagcttgccggggaaatccgccagtgcctgggcatcgtgaaaaccattttcggtacgctgggcatgacggactaccgcgtgcgcctttccatgcgcgacccggaaagcgacaaatacgtgggttctccggaaaactgggacaaagcggaacaggctctgcgggaagctgcggaatggctgggggcggactacagcgaggaagcaggggaagccgccttctacggccccaagatcgacttcatcgtgcgcgacgccatcggccgcgaatggcagctgggaaccgtgcaggtggactacaacctgccggaacgctttgacctccattacaccggagcggacaacaagccgcaccggcccgtgatggtgcaccgcgcccccttcggctccatggaacgcttcacgggtcttctgattgaacactttgaaggcaaattccccacctggctttccccggaacaggtgcgcgtgcttcccatctccgacaaggtgacggatgtggctgccgcgcatcgaaccgccctggccgccagaggcgtgcgcgtcacggtggatgaaacgccggacaaaataggcgccaaaatccgcaatgcccgtctggaccgcgttccctacatgctggtgctcggccagcgggaggcggaagacggcaccgtctccgtccgccaccgggacaagggggacctgggcgcgatgccctttgagcaattcgcggacctcgtagcccgggaaatcgcggagcgtcatatttctcccgtgatttgagttgccaagttattccttttagtttagtagtatccggacgtgccaaccaagccaacgaagaataatgacggaaatcgccgccgtgaccgcggcgatcagactcggatcaatgaacggattcgtgcgccccgcgtgcgggtagtgactgccaacggcgaccagctgggcgtcatgaacacgcgcgacgcgctggaaaaagccagggctcttggtctggacctggtggaagtggccggcaatgccgatccgcccgtatgccgcgtggttgattacggcaagtacaaataccagcaggccaaactccagaaaaacaacaagagccgaaccgtcaagcttaaggaaatcaagctccgcatcggtacggataccaatgactataatgtgaaaatggcccgtacggaaagctttctggatcatggccacaaggtccgtttccagctccgtttccgcggtcgtgagaacgcccaccaggagcttggctacgacgttttcaacaaagtcatcgcggacatgaagaccatggcgcaggtggaccaggccccgcgcctggccggcaacaccatgcacatggtgctttccccgctccctgcccagcagcgcgtgaagaaattcaccgcccacctggataaggacttcgattccgaagactccgcctttgacgcggaagacgacgagtaaaacgcctctccccgtctttatacgtcttaacgaaccttcctcctctgcaacatgaggtggaaggttttttattaacgacttttctcatggaggcaaagtattcatacaacgataaggcagttgtaattgtttttacagttcgcgtctggaaacgaatggaaaattgaaagacatttcatggatgttaataataagctaagcaggttgaatctgaaaaattgggacattgttttcgataggcaaatgtatttcatgaaaagatggctgttcctgaattagttgcagatatcgctttttatacggaaagagttattgacaaagaggaaaaattattaaatatactgaagcatattataatttttgattgttgtgaaaaagatgaaaggaagatatgcaagttagtacagttttatccaaatttgaaatgtctgaagaagacattaagttgcagtatataacgcctgcgattattgcaaaatggaatattggcaggattacgatggaaactcaggtgactgacggtaaaatcaacctcaggggaaactttgtgtctcgtgaaaaaccgaagcgtgcagattatattttatatttgaatgtaaataaccccatagccattattgaagccaaagataataaacacagtgtttcctatgggttgcagcaagctaaagcatatgctcagatgcttgatattccgtttgcatacagttccaacggagatggttttgccgagtttgatgcccttaccgggaaagaacgggaatttagcatggatgaatttccgacagaagcggaattagtggctcgctataagcaggagtccggaatgacacccgtacaagagactttagtcgaccagccttactacagtagccagaatacatatcctccccgttattatcaaagaatagcgattaatagaactgtggacgcgattgcaaggggacaggatcgtttattgctggttatggcgaccggtacggggaaaacatataccgcttttcagattgtttatcgtctgttgcgaagtgggttgaaaagaaagatcctttaccttgctgaccgcaatattcttgtggatcagtctatccagcaggactttgcgccgttggaaaaggtcattcataaggtcaatattgccaaggataataagaataccatcacttctcatgaggtatatttctccttatatcagcagttggttggtgacgataataaagagcatttcagagaactgtttacgccgaatttctttgatctcattatcgtggatgagtgtcatcgtggttctgtaaaggaagaaagccgctggcgcaaaattctggaatatttcagttctgcaactcagatcggcatgactgcaacgccaaaggagaccaagtatatctccaacctgagttattttggtgatcctgtatatatgtacagcctgagggaaggtattgaagatgggttccttgcgccattcaaggttatcaatattatgaccgacattggtgacggttggcgtcctcgtaaggggcagaaagatatttatgggcaggaaatagaagatcgcatctacaccaatagcgattatgattacaacattattattgaagatcgtatatatcaggtagcttcagaaataacacgctatcttaaaagcacagatagaatggctaaaaccattgtgttctgtgccacagaagatgctgcggagcgtatgcgtcaggcgctggtgaatctgaactctgatatggtcaaagagaatccggattatgtggtgcgtattactggaagcgatgattatggcaagaagaagctggattacttcatttccgtctctgcgccatatcccgtcattgcaaccacatccaagcttttgtctaccggtgcggactgtaagatgacgaagctcattgttttggatgaaatgatcggatccatgacagagtttaagcagattatcggacgtggtacaagactgcgtgaaaaagaaggtaaaactcatttcgtagtaatggatttccgcaatgttagcagactgtttgctgacccggattgggatggtccgattgttgttgatcctggattcactccgggtggacatatactacctccgggcggtggtgatcctgttgacccacctacacctccaacaccaccaactgtaaagccagttgtgggacgtgatggctgcaaggttgaaattatccataaaacagtatctgtttacgatgctaatggcaaactgctccgccaagaaagtattactgactacacaaaggaaaatatccggggtgaatacgcatctctggataatttcattcgtcagtggtcgaaggaagaaaaaaaagagaaaatcagagaaatgcttctggaacgtggcattgaccttgaactgatgaaaacagatcaggatatggctgatgtggatgattttgactttatttgccacgtggcttttaataaaaagccgctgacccgtaaagagagagccaacaatgtcaaaaagcgtgattttttcagcaaatacagcggtgttgcaagagaggtactggaagtccttctcgacaagtacatgaacactggaatttatgaaattgaaaagacagaaattttgaaacttgacccgttccttaaacttggcaagcccgcaaagattgccggatatttcggtggtaaggacggatatatcaaagcggttaaggaacttgagaaagctatttacacagacgaggctgtataaacaatgagtaatttatccggatttgtaaaaagactccgtgacattatgcgcaatgatgctggcatcaatggtgatgctcagcgtattgagcagattgcatggatgctctttctgaaagtatatgatgcaaaagagcaggattgggaatgggatgatgaggactatgtctccattattccggaagaatgccgttggcggaattgggctgttgatgactgctcagggactgtgaagacaggagacaggttgttgaattttgtgaacagcacattgttcccgacgctgaaaaggcttcctgtcgatgtatctaccccgattaaaaaggctatcgtgcagactacttttgctgatgccaaccagtacatgaaagatggagtcctgctccggcaggttatcaatgtcattgatgatttagaccttggtgactatgaggaaagccatgctttcggcgaaatctatgaaacgattttgaaagaactgcagagtgccggttcttccggtgagttctacacccctcgtgccgttactgattttatggcaaagatgattaatccgcagattggcgaacaggttgcggactttgcctgcggcactggcggttttcttacaagctggctgaaggaactttctgctaaaatcaaaactacagaagatcaggcagcttatgatgcttctatctacggaattgagaagaagcagtttccttatatgctgtgcatcaccaatatgctgctgcatggtattgatgtgccgaaaatttaccatgacaactctttgctgaaagatgttctggactacacacgggatgatcagttcgatgttattctgatgaatccgccttacggcggcaatgagaaaacagaagtgaagaaccattttccggcagacttggcaagcagtgagacagcagacctctttatgtctgttatcatgtaccgtctgaaaaagaatggtcgtgcggctgttattctgcctgatggtttcctgttcggcacagataatgcaaaggttgcgatcaagaagaaactgttctctgagtttaacctgcatacagtgatccgtatgccgcacagcgtgtttgcaccgtacacatccatcactaccaacattctgttctttgatcgcactaagcctacagaggaaacttggttctatcgtctggatatgccggagggttacaagaacttctccaagaccaagccgatggaactgaaacactttgatgctgctgtgaattggtggaataacagagaagaaatcaatgtagacgggttcgataaggcaaaaaaatttaccgcagaagaaatcgctgcaagaaactacaatatcgacctttgcggttaccctcacgaggaagaggaaatattgcctcctaaggaactgattcagcagtatcaggaaaagcgagcaagcctgaatgcggatattgaccgcactctggctcagattacagggatattgggaattgatttggaggaagaataatgactgggcaacagctgaaaaactcaatattgcagatggctgttcagggtaagcttgttccgcaaaacccaaacgatgagccggcttctgtattacttgagagaataagaaaagaaaaagagcagcttattaaagaaggtaaaataaaaagagagaaaaacctttcttacatcttccgtggtgccgataacttgccttatgagaaagtcggcaaaaacgagcctgtgtgcattgcggatgaggtgccatttgagattccggacagctgggtatgggcaagacttggaatgatttcctcctactcgcacacaaaacagaaaatcaatgcccaaaatgccaatcttgatatgtggggacttgaccttgaagatattgaaaaaggcggcagactcttagcacgcaaaacggtgggcgaacgcaaagccgttggtgacaaaactttttttgatagcggagatattctttatagtaaactccgtccatatttgctaaaaattcttgttgcccctgactgtggaatttgcacacctgaaattgttccatttaaggtgtttggaaagctcaatcctgagtacattgttgctttcttaaaatgtccgtatgtaaatgcaattataaacgctgttacctatggtgtgaaaatgcccagagttggcacagaaacaatggctgatttgctggtaccaatccctccactttccgagcaaaagagaattgtcgaaaagttaaacgaggtaacaccgcttacagacagctatgccgaagtgtatgttcgagtagcaggattgaatcaggaatttccagaacttctaaaaaaatccattttacaagaagccgttcaaggcaaacttgttccacaagaccctgctgatgaaccggcttccgtccttctgaagcgcattcgttctgagaaggagcagctgattaaggcaggcaaaatcaagcgtgataagcacgaatccgtcattttcagaagggataattctcattatgagaagttggacggaatcgatcgctgtatcgacgatgagataccgtttgagattccggacagctgggtatgggagcgttggggcaatatattccaatccattcagtacggatataatgctcctgcaaaggattgtggtcgaatcaaaatggttcgtattagtgatatccaagacaattctgtattatgggaaacagttccttactgtgatataaaggaaaatgaaattagcacctaccttctgcaaccaaatgacattttgtttgcaagaacaggaggaacagttggaaagtcttatcttgtacaagaagttcctgaagaagcaatctacgcaggatacttaataagaaccagatacagtcaatgggtataccctcaatatttgaaattctttatggaaagtgaactgtattggagccagctgcgtaatggcactattgcgacagcgcaaccaaactgtaatggcagaacgttaggaaaaatgttattgcctattccaccattgtctgagcagtatcgaattgtcgaaaaggtcaatgttctatttggtcattgcaattcaatataaagcataaggcatacacttcaatcatccgaagtgtatgcccgtctttttaccaatctacggttgaatcaacgattttacgttgttctgtagctgtttttctgaggtagatacgggtggtttcaatgctttcatgccccatgaggtcagccaggaacgcaatatcattacagcgatcaaggaagctcttggcgaacctgtgacggaacgagtgcggatatacaaccgcaggattgatcccgtacttcaccgccagttttttcagctgcccggagatgccacgggtggtaatacgtttcccatatttgttcaaaaaaatgaagccacttttctgttgcttttcagacaaccaagaaagggcttcattttgtaattctttggggatatagattctgcgtaatttgccgcctttggaatataggtcgagatgccccagcttaacgtgttcagccttaatctgaatcaattcactgactctggctccggtggcggcaaggaaacggatcacaaaataccagaacatttcatcatcctttttcagacaggacttgaagtattcgtagtctgcttcgctgattacattttccagaaatgttttctgctgaacacggacaaatggcagcttccatttctccttgccgatgcactccaagtaacagttcatggcacgaagtctgagattaaccgtcttgggcttgtaattctcaatcagccgtactttgtactcacgcaactttttctgggtgacgtcatcgtattgttctccgtactgcttgatggcaaacatatacgatgaaatggtgttttctgagagatttgttcctctcaagcgtttttcaaatttttctttatctatcatagcgaaagacctcctttcgccagatattatacaattctacgctaaatcagcgtgatcttatcgaacaattctcgctgtttttcaacaatacggcgttgttctgataaaggagggagtggaattaatagattcttcaaaatatctgttgttatatttttccatgcggtaccggtagaaagtgacatcaataattcgaccattgcttggatcagaattattatatagtccatttccaagctggtattcttgaagcacatacacattaaaccgtcatatatgtatccggaaatattcagttttgcaatcttacccaagctgccacttgctgcagtaatcaaataatcgctatcaacaaaaacacttttggtagttccgaggtcggtcagaaattcatccgtatcatataagtaatcgttttgagtgtactttgtaatatcggatattttaatccaatgatgaggtgtcctttctgatgaccagtattcaggacttcccttaggtcgtggagatgcaccacgttgtacgccgatcattgttcccaatctcgtccaacaccagccttccggaatgtcaaacggtatctcatcgtcgatacaacgctcaattccatccaacttctcataatgagaactttacaaagctatacacgcttcaaggacttttctaagctgtgctaagattcgtacttgttcctgaagcggaggaactggaatccatagttgtttcaatttatccgcttttataccttttacagtggtgcctgtactttgctcaattaactggctttgaaaacagtcggatagcatgaagtacatgacaagattgttatttataagaggatatgtagtgtactgttgcaacgtaatcaatcgttgacctgcactaaattgatccaaatctgcaagtgcaacatttcccaatggtgcttctgttgtaaagagaatgtcacctctttgtgatattcctcttgattgacgagtacagtattcctcttcagaaatatagtccctgattttatagtcgatatatccttttttgacattttttgcggtaatgagaggaactccagtatcgattttagttggggtggaaccacgataatcaataaaattataaagattgattaggcgttcccattgccagttatttggtagttcgaatggaaggtactcatcaatgcaaacttcctcagaaccacgcttttcataatgagaattatcccttctgaaaatgacggattcgtgcttatcacgcttgattttgcctgccttaatcagctgctccttctcagaacgaatgcgcttcagaaggacggaagctggttcatcagcagggtcttgtgggacaagttttccctggactgcttcctgcaaaatagatttcttcagaagttctgggaatacacaatttaaattttgcagttgtgattccttttttgaatattcatctataaaaggagttacagacttgaagaaagctataatcttgctttgttcattgtatggtggcaaaggtagcaaagacgaaagtatatcctcacgagaaacgcctggtatcatactttttgcggcagccttgagagaagcgacgagagtttccaagactaattgaatatactctatttttatcaaattaccgcttctaatagccattatctgtcttgcaatatgaacttgattttcttcaagaattgccattgtaccaattgtacctttgcaagttatcagcaaatcacctttgtaagcaaatgctttgccatattcagtccagcgatttataataactttttcattttcgatattgcttgcaccagttagataaggaataccttgctttgcagaattatatttatctggtgtcatatcttgcccagattgcagttctattactgctgaaaatctaacccactcccatgtgtccggaatctcaaatggcacctcatccgcaatgcacacaggctcgtttttgccgactttctcataaggcaagttatcggtatctaaatcatggaagatgactgagcgtgaaaaataccccatggaggaacaacttttgcctcataggagggaatcatgccactttcatcatcccctttgtaagggaagaaggatttattgttcttttcgcggctttttgaacggctgcatgcggcacgtggtggcggtgcgccagagccattccagggggccgtacaggaaatggcttagccagaggcggcaggcccaggcctggaggaggaagacggcaacagctgcgcacaggcatggccacggccccatgtcctgggccaggcccagcccccacccgaagaagaggaaggtgaagaccagcgtctgggtgatgtagcaggtcagcgtgcatttgccggcgctgctgagcagtctggcaggcaggggaaggccgggatgggtgaacagcaggacggcggcggagacgaaagccgcggtataggccaggttttcccattggtgcagaaggtgtcctgcgtccactcccagcgcggagtccagccgggaggggagtaacaggcgcgccgccagcagagccaggaacagggttccggagattcccagcatccgcaggaacaggcggcgtttgttgggcgcgtcttcaaaggcgcgccatctgcccgccagcatgcccaggatgaagaggcccagcgtctgccagaggcggccgctgagcaggaagaactgccatttgcccgcctggccctgcgtcaggttccacagggccgcctgaccccagctgccgtgggcgtacaggaattcccgcgtggggcccgcagccggggagcccgtatggaaccagccggaggagtggggccaccagtccgccagcccggcatggttcagcaggtccataagcatgaccggctgaatcaggcacagggcgcagagggtgatgagcaggggagtcccgcatttgtagagcatgaccagggcaaagcccagggtaccgaagagggtgaggatgtctccgtcatagaacagggtatgcgccagacccagcaggaacaggagcgtcaggcgccacatgaagcgtttccggaagtcgattccctgctgctcccgcctgtccagctggatgaagaagctgaggccaaacaggaaggagaagagcaggaaggatttgctgacaaagagatgttcataggcccagtccgccgcgctgttggccgcagcctgccatccttccgccgggggcatggggagatagaggttgaagtggtcgtgcgtgtggacgatgacgatgcccagcagggccagagcccggaggatatccagaatggtgatgcgcgcggccgggggaggcgttccggcgggagtccgggcggtcatggcgtcagcaggggcgggaaaaggatgggagaagttccgccgcgcgcctcctggcccattggtccgcttccagaatgggggccagttccccgcggggatccgccggggtgtggtcgtccatgacggcctccaccagtttccagatgccggggaaagagatttggccgtggatgaaggcattcaccgccgcttcattggcggcgttgtaaacggctgccagggtgctgttgccggctcctgccctgcgcgccaggtccagggcggggaagacgtccgtgcggggggcctcaaacaccagccggccgatttccgcgaaattgagctgcttcagggagttgggaacgcggtccggccatgtgacggcgtactggatggggaagcacatgtccgagctgctcatctgggccagcaccgtgccgtcccggtattccaccatggagtgcacgatgctctgcgggtggacgatgacgtctactttttccatggggacgtcaaagagccagcgggcctcaatcatttccagccctttattgaacagggtggcggagtctatggtgattttgcggcccatgctccaggtggggtgcttgagggcctgttccagcgtgacgtgttccagatcttccctgttccaggtgcggaaggggccgccggatgccgtcagaatcaggcgggagacggcttccgggccgccgtggctgccgttcaggcattggaaaatggcgttgtgctcgctgtccaccggaagcacctgcacaccggcccggcgggctttttccatgacgatttgcccggccatgaccaggatttccttgctggcgatggcgaggtccttgcctgcttcaatggcggccagagcgggtttgagcccggcggttcccacgatggagattaataccatgtccgcctccgggagctgcgccaggcgacacagcccctcttctcccgtttccacctgcgcgccggggagggaggccgccagaccggcagctccggacgggtcgtaaatgcatacgttgcggacgttgaattcgcgtgcctggcgggccagcgcctccacgctggttcctgcggccagccccacgatttccattctgtccggaatgtcccgggcgactttcagggcgctggttccgatggaacctgtggaccccaggatgacaacgcgtcgtttctgcataacggagaaacatgatgcaaaaaatacggcctcttgacaagccgggggatgaaaatcttccccgcgccgcgtggaccgttttttccgtcagtacggcttcattccggtgggccgggaggaaggccgccacgcattcgtgccgcaggcggcaggtgccgtgggttgatacgttcctgctgacttgtcaggcagagaaccccggaaaagagcgggattggacgtgaagtaaagttccgccgcatggaaaagggttgtattttcctccggagggcgtataggatggcacgaatgaagcgcatcgccgtgtatgccggtagtttcgaccctctgaccaacggtcatttatggatgatcaggcagggggcgaggatgtttgatgaactgattgtggccatgggcgataatccggacaagcgttatacgttttctcatgaggagcgcatggatatgctgcgggtggcgctttccgacatgccggatgtgcgcattgccgagttccacaaccgctttctggtggattttgccaatgaacacggggccacgttcatgctgcgcggcatccgttccacgcaggattacgagtatgaacgcgtgatgcgccatatcaatgcggatatggcccccaaggtctgtacggtgttcctgatgcctccccgggatacggcggagttgtcctccagcatggtgaaagggttgattgggccggaaggctgggagggccaggtgagccgctatgttccccacaatgtattcgccatgttgaaggagaagtaccgtgaggtttttccgcgttcctagcggagattccggatttccgttccgttattcgctgtccggtggagagggggcaggggcggaacgcctccgcctccttctgtctttctgctttctcatgcgctggatgacgcgggctcttgcggcgcatcggcccgtttgcgtttgttccacagcatcgcacagttccctgcgcgccagaaagcggttgagttccctggatctgtccgcatggcatttgacggcgatgcccgtgggcgtgtgcctgaggtaaacgcagttgttggttttatttactttctggccgcctcgcccgcttccgcggacaaagctttcctccagatcctgttcacggatgcccagggcctccatccgttcccggagagctgccagtttttcaggcctgaccatagccggaggattgcagggtgttaacgcgctgccggacagcatgggccagcatgtcccggctggcggccgtcatggggcggaggctgacggcaacggttgagccgtcagccaggcggaggttcaaccgtccgccttcccggtccgcagagcgaatctgctgccagaagaaccattgcatggtgcgctgcgttctcaggaacggcaggatttccactcccaccggggtgacgatgacggccgcgtgtttcaggcagcggctccccgcagccaggcagaggacggcgggaacaagcgctgtggcctgcatggcccacaggggagcgggcaaatacggggtaattgtatcatatcccgtgagctggaggaaagcggcggtggctgccagaaggaaccccgccgccgtcaggatggcgcctgaccggttccgggtgaagcgcagctcccgtttccggacgggaatgtgccggatgtcctccacgcccagaccggcctgaaccggacggggcgcggaagcgggaagatggcgttcaggctccggcatagacgcccgggaggatttccttcgtttcgtcggagttgttttccatcagcaaggtgccccggagaacggctccgtcctggaagtggaagcggccgcgcagggtcagcttgtccatgcctatcagggagggcaggcccagcccgtccagggaatccaccagcttgtacagtttggaatccaggtccaccaccggggtgttgccctgccgttccggcgccagggccacgttgccgtgttcatccacggcgatggcgtccgaacggagcaggaacaggtcggaagtggttttgacggggaagaaacgggaacgcgggacgttgacggccctggcgccggggaagcattcgatgcccgcgcccatggccgtttccagctggtacaccggggcggattccggatcgcgggggttgagcgtctttttattacggatcatgggcagcgggagtacgccgccgttggcgtccagaatttccttgagggcgtccaggcgtatccagagcgtattggtgttgaaatagcggtgcctggaaatgttctgggattcaggaatgtcctcatccgggcactgggccacttcccgcagaatcaactggccgtccgatttcctgacagccaggtggccgcctttcctgtccgcctccgtgcggcgggtgacttccatgacgaagggggcgccgctttccgcaaaccagcggaggaagttcatgtcaagctgggcgcccagattatcggaattggagacaaaagcgtatttaacgccatccgccagcaggcggtccagccagccggaccccagcagggccggatacaggtccccatggccgggcggacaccattccagctccggctgttccgggcagctggccggggagaggccgtccgccaggattttgggaacgcggttttgcagcagctccacttcggcgcggtccgcaaagccgtccgccgcgtatttttccaggtaggccagcgtgtccgcgctggtggagaaggagttcatcagcagaaggcgcacaggcgtgccggagatggagcgcagatgcttcacctgcctgacgatcaaatccagaaacgtatcttctccttttactttcagcaggcttttcgctttctggaggcccatgctcgtgccgaggccgccgttgagcttgatgcatacgcaacgggaaatcaggtccttgtccgccgcgggggtggaggccgtgatgtcctgccagtcttccacctggtcggcgggcaggatatccgtttccggaatcatgccggagtggttggaaacaagggcttcataacaacgggagaaagcgttgacggccgcggctgaaacgccggcggactccatcttttccgcaaaaggagtgaacgtactcattggcggcttttgtacaaaatgcccggaggaggctcaagcattatcagcgtatccggaatgcccgcgcgttttctctttcttgcggggactgctccgggttatctggctgccgtcacccggatccgccgatagtccgccacccattgggaaccgtcccataactcatctttcagggaatcctccatttccttgaaaatctggatgcgctgttcttcgtggaggttgttcaagtcttcccggaagaattgacacgcccagttgcgcaggccgtcaggaccgcctttcagcggcgtggggcggtcaaattccttcatggtttccgggcggagcccggcttgttccagcacgctgccgtattcttccgcggcgggaaagtaaaaacgcgttgtgtacgggaggctcctgcgttccagggctgtccggaaagcttccctgatgcggagaatattgaggcgggctccgaattcgcagaccagtttcccctgcggcttcaggacgcgggaaacggcatttaagagagtcccatggtccggtatccaatggagggccgcattggagaaaacgatgtcaaatctgttgcgccagggcatgaggcgggcgtccagcacgcggaagtccatgccgggatagagctggcgggcttttgctatcatttccggagaggagtccaggccggtgacggatgccgatttctccagcagagcgtgcgtcagcgtaccggttccgcagcccaggtccagaatggactggtctggattttccggtacgcaggagagcagttccctgccgtattccgcgacaaaaccgtgtttgttttcgtaccattcagcgttccagtccattacctctccatcgtagggaaaaagggggtttttttcaagaaagaccctgcctttttttcatggtatttttcccggagggcctctgtccatttctccgcgccgtgccgggattcttcttgcgttggcgggcgggaaatggttaagataagcttactatgaaagcaacagccctgttcttggcggcttccgccctggccgcggtttccgccgtcgcctatgacggatacggttatgacccccggcccgcgagttcctataacaataccatcagcggagcggcccatatcggctatgattcccggtatgcctataaagacgtggtggcttcctccctgctgaaccgcagcggcgtgtttaacatcggcggcgagctgaacctcaacctggccagagactggaagcaggaaatcggcgcggaatacatggctttctgcgacgggctgctgagcgacaaggacgcctttgacgccagctggaaggctgtcaaagagctgttccccaatctttccttccggggcgggtatgagttgaattacggcggactcccggggtatttgagcaagcacatgggaaaggctccccattccctcgcccagtccgtcacggcggggctggcgtatgacgatccgggccacggctattttggctccctggatgtgcagtacggcttttacggcatgaccggctggcgcattgacctgaacgcgggcaagcgctggagcggtctgattcatgaaaaggtggatctggagctgagcgccggaacaggttattcttccagttactgggggcccggcgcagccgggtttgaccaggttaacatcaagctggcggctcccgtgcgcgtaacgggtgtggactccagccgcgggttccggattattcctttcatccagcttgactgggcgggaaacacccgttccgaaatccgccgttacgccggcatgaacgcgattgaggacttccgcatccgtgtgggcgtggaagccgtttaccgtttttaagcggctgctccgcggccctttcaccgggaagggccgcggaagcgttccccctttccgggggcgcatgccccctccccggcttcccttgaatcccctgccatgttgaaaatgatttttctgctggcccggcgcatgtttatacggctgttgctggtgctgcttccgctgggcctgtttatgttcctggcgcaggccattcccctttcccctctgcaatccctgctgttgctggttccggtgattgcctttgaagtgtggctcgtcatcaggcatctgctgcccgtcatgggggagctggtgtccaagacgctgtattcctccaatattactacggatgaggaagtgctggtggaggcttccaggcgcatgctgaattccggggatccccagggcgctctggaattactggaacgctaccggaaggagaatccggggctggtgcgttcctggctcatggaatccagcctgctgaacgatatgcgccggtacgcggattccgtcaacgtccttcagaaaggactggaatacggaggatggcgcaaggaggaccgggctctgtttctgtacaagataggagccatttacgagtcccagctcaataacccggacagggcccggaagtattgggaggaagctgcggataaatatcccgatacggcctatggccgctccgccctggacaaactctgattggaatcgggaacagagcaaaagtttttgatataaatttcacccggagttatgtgcccagggattcttttttccgggggcggtggagccatgtaatttccgtacacgcagcgcaggtagccatcggcgtttcccatggcgtcaaattggaatccttcaaaaggcacggcttgatttccttggtaatacgcgccgggaactttttcttttgtgccatatccccagatgacattaccggcccaacgggatttttcccatgaataacgtctggcaatccaatgacttattttgttccaacgggcggatgccgctcctaatgtgagcgttttaaacataaacagaaacaattgctttggaaggctcctgccttttacccacaaatgaaggctggccagcgtggcggcatgacggaacagtctgtgaaggtataggtaggcgttagcggcaatgagggattttggcatgccgtcaagggggaaaatatcaatgtgcagtcctatgcggacccgttcttttccctttccaatcatgatggtgcgggtgtcttccagtttcatgaacgggtagaagtatcccggcctggtgcgggaatcgtttaattccagataagccggatgcggagaagtacggtaaagatgaaacagccgttcatagtcttcccggggcataagtacgtcaatgtcatcatcccacggaatgaagccctgatggcgcaatgccccgatcaggcttcccgcgtatagggaataacgtaaattttctctgtggcagaattgatgaaattcctgtaaaatttcaagcaggatttgttttgcctgggaaacggagatttctttcatcggattttcagatggttttttatccgggtcgtggagatttccggagtccgttccaagtagacgacttcacatatgtcttttagaaaatcgaatttcccttcccagtcatttcccatgacaaatatgttgacgttgtgcttgatgatgtcttcctgcttctgttcccaatcattttccggaatgatcaggtccacgtaccggatggcttccagcatttgcctgcggtgttcgtaatggaaaaaagattgcttgtttttggtggcattgaaggaatccgaagaaagggcgacgatcaagtaatctcccaaagctttggcccgccgaagcaagttgacgtggccgtaatgcagcatgtcgaatgtgccgtaggtaattacttttttcatgatgatttgttttgattcatagcgggttggtttgggcaatagagcctacgccgatggcgtatggggcgcttttccccgacgccactcgtattcttttttcagggatattcctttgagggcggcttgataacaggcataaaattcatttttgcgtaaagcgatggctgtgttgatcttccgcttaagccatttaatttggtggctgcttcccatgttcagggcaaaataatgaccgttgtccgatttccaggaaccgcagcagtggtgaatggaaaagccgcgagagcgtatcaaggccggctgttcaaaaaattccttgggataaatggttaccaggtcattgctccaggtttttccgtttaataaaaaaccgggaatttcgttaatgaaataatccgtatagacgctgttggatacaggccagcaatccggtttaatttgattatataaatcaagcagattcatgcagaccgggtggtggggcggagcatagagaaaagctgtgccgagagcgcaattatagatgtatcccaatgagaaacgatgatttacaggaagaagagataaaggtttaactaattctatatcgcagtccaaataaaaacctccgtgctccgttaaagcctgaaggcggacgacgtctcctaaaaacccccattttttttgtttcagacatcttctgccaaattcaaaagaggatacatcaatattgttttcgttccattcaatcaattcaaactccgggttgagggctttccatctttgcacattggccaagacggcgttgggaacaggtccgccaaaccagcaataatggagttttttgatcacgcgattgaggaacttatttccctttcagtctgcggattgcctatccgcatcatgctccgaatagttgaattccaagattatcaaatggttatcatctcatactcctttttattttttcatttttccccaatcaaaattttcctatcatgttttcattcaaatttttctgttgacttctgataggcaatccgctattcagcggtaaggcaaagaaacagagggtggtatagtttatttttatttcaaaaggaggagttttttacatactggatatggcagggctggggcgtatgaaatacatggtgctttgcaatcttccctaccgtttgcgggagatcgccggacggatcgcgaagaaatgcaggagaaggaaagaccggtctcttgaagcgaagctggaggatattcgcaatttgcttatttataaccaccctatttcctctgttcccccggcgacggggaagttgaggctccttcaggacggcaatacggttttgctggccctttttgcgcgcaaatgccgggaaaacggactgcggtactggctggattacggcacgctgctgggggcggtaaggcacaggggctttattccgtgggatgatgatctggatgtgagcatgatgaggccggagttcgaccgcctgctggaattgcttcccgttcttttcccccgtgaggaaggatttacctggaacaggcacgcctttctgcaaataggatatgagggcacccccctcaaccttgatgtgtatccctatcatttttatgcagagagtctttcatctccggaacagcatgagaagctggacaggcttttgagcggatttaagaaagacgtggtgctggtaggttccaggatgaacctgaccgatgggcaggttcaggagaagatccgccaggatattctggaaggaagggatgctgccggggaagatgaagcccccgggatttttctttctcctgccattacgtttacaaaaaacacgcacctttcctatgaaacgttctttccccttggctccgcagaatttgaggggataatattttccgtgcccaaccatgcccgccagtacctgcaatttttttacggcgactatctgtcttatccggaacgcatccagttcaagcatccttccgtgaaggccatggtggagaaggttccctttgaggcggcggttaaccgtttcattgacgtttacggaaagcggattgatgcgcccatgccatgaaaacggttattacttacggaacctttgatttgctgcacacggggcacgtgaatctgctgaagagagcccggaaactgggggatcggctcatcgtcggcgtgactacggacagttacgaccagagccgcggcaagctgaatgtcatggagagcctggaggaacgcatggaaaatgtgcggaaaaccggtctggcggatctcattattaaggaagaactggaagggcagaagattcatgacatacggaagtacggggcggatgtttttgtgattggctccgactggtcggggaaatttgactatcttcgcgattattgtgaggtggtttacctggaacgcaccaagggcgtttcttcaacagacctccgttccgcccggaatcccattgtatatatgggaattgcaggtcacggacgcatagcgggccgtttcctccgggagtccaaatatgtcagcaatattgaaataacagccgttttcggaaggaatgaggagaaagtccgccgttttgcagagtcccacgctctgctggaatattatacggaatacgaacagtttctggaccgggttcatgccgtttatattgccgtcccccatcatctccattatgaaatggccaggaaggccctgttgcgggggaagcatgtattgtgcgagaagcctcttgcccttgcccgggaggaggcggaagagctgttccggctggccgaggagaagggagttgttttgctggaagcccttaaaactgcgttttgtccggctttccagcaattgaccagtttggcggggagcggcattattggttccatcaaggcagtggatgccacgtttaccaagctgataaaggatgaggctgccagggagtatgaccccatgcaggccggaggcgcctggacggaactgggttcctatcccgcctttgtcattgggaagcttctgggaaccgagccccgcaggattcgttttgtgacctgcagaaagcctcatacgggcgtggacgtgttcacgcgcgcggaatttctttattccaatgcagtagccaccgctacggcagccataggagccaagcaggaaggggacttgtgcattactggaacggaggggtatatttatgtgccggcgccttggtggaagacggagatgtttgaagtgcggtttgaggatgcccggctcaacaggaaatattttgccaattttgaaggggatggactgcgttatgaacttggcgcgtttttgcgcctgattcatggctgccagcacggcaaccgtcttttgacccgtgaggattccatgttcatggctgatattgcctcccgtttcaggcgtggggaatgtgttgatgaaatcagctgatcagggtaggcatgccgtctgccggaaatgaaaggagggagatttttctttctgctcatcaacattgatcaggcggtcataaatgtgcctggcgaagacgatatcgtggaggcccagcccgatattataactgagaatgcgttcttccggagacgttcttcccgctgtttttccggccagaaccggagctatttccccaaattgacgaaagcgctcaaaatgccggaaattcttaacatggtcacgatcatcggcaaataccttgtcgaaaaacaaatcacaattttggaatccctttgtatgtacggggataacagtaatgcctggtttaaaacagctgtcgtcggcaaggatgccctccgcattagtaatgcaggaaatgacggcatctgttccatcaatgaggctgttgatgttttgcgcttcttcaaaacggacgttgctatggcattggaattcttcaatgaattggggaacatgcgttttgtaggaaagaagacgcaccgtgaagtttttttcaggatataacgccagaatgcatgccatggtggcgcgggccgtatttcccagccccatcagggaaattgtctggaaatcttgtctggcgaatgtttgaagggcgagggcagctactgctccggtacgggcgtttgtgacccaaaaggcgtccataagagccagaagctttccggtgtgataatcgtaaaggagtatttccccattaatggttttggtccgttccggataacgcgttacaatttttacccccatggcgttcaggccggggacgatgcagggcatcgtattcatgaatttcccttcttcaaaggcgatgcttgttttatggggaaggaagacaggttcttcgtccttgatgcggaaggattcttttacccattggagtgcctgccggggagaaatattgagggaggaaatgatttcgtgaggaattgtcagcatggcaggggggtaaggtaaaaacggcgtttgggaaaagggtggtaatgactagtttgaatgcatggaacaaatctcgtgcatggcccggaccagggcatcattgtcggttgcgtccctgacggcgatacggatgaattctctgccttcaaatccttttttccggctgcagtccttaacaaggatggagtggtttttcagcagaaggccggtcagggagcgggctttcatggggggcttgacctcgcacatgaagtagtttgcctgggaggggaaaacgttcaggaaaggcacgcgggagagttcctgcatgaagcggtcccgttccttcatgaaacggttgcacgcgcgcacgtaggattgctcgtattttccgaagatttgcatgtagaattccgcgatggaattgatgttccagatggaaacgtctttttttatccatgccgccaattccctgtctgcggaggccagaacacccaggcggaggcccggaacgccgtaggatttggaaatgctttttaccacggccaggtggggatattcttccaggatgccgtctttcagcagcgtattgtccggcattccgcaggagaagtctacaaaggattcatccacgatcaggcggatgccgcgggtttttgtccacaggcagaggcgcagcacatcgcctttcggcaggaagaagccggaagggtttcccggattgacgaggagcagggtaccgatgtctttcccggaaaagaattccatcaggtcgtccgccgtataagtgaaattccgggaagcggtatggaagggaaccaccatatccggtttcacccggttggggtattcttcaaaggtagggtagatgacccccattttcccttccaggcgggacatgagcgccttaatgagttccgccgcgccgttgccgatgcagatgtattcctggctgatgccgaagtattttgccgccagcaggctgttgaccctcattccggacgggtattccctcaccaggcgttcaaaattcgccttgagttcggacatgaggcgtttgttggggaaatagggattgaccaggtaacagaaatccctgatgcggggatagcgccagtagcctccgtaccgggattccatcaggcgcaggtgttcttccctgtccggggtgaatatggaggctgcgatgtccagatcctggatgtcgtctatttcataccatgcttcgccgccgaggcgcagcgccttgatttccggcttgtccagcagggcgatgacccgcagcacctgttcgtaatattcattattgcccagggctttgctgtaggctgtaagaaaggggacgtaatgggtccgggagaattccctgctgaatttgtaaatattgactgttttaaaatattccgtctttttcttgtaggagaatttgctgccgggaatgaattgcctgatgttgtcgtcttcatccagagtgacgaccgtgccgtccatccagctttcaaatttggcgacgagagcaaggctggggtagggatggcggagcagggcatcaataacggagtcttcaaaaatcaggtcggattcaaaaagcagcgtatcgtcctgaagcaggtgttccttggccaggtacagggaataaatattgttggtgctggcgtacaggggattgtccacatattccacaggggtggaaatgtccagccgggaaacgaaggttttgagtttttccccttcataacccgtaacaatcacgattttttccagagacggggaaaggcggtccaattgtctcatcatgcgttctatcagcgtcactccgttgacctggatcatgcacttggtattgttccgggtgagcgctcccagtctttttcccattccggccgctaaaatgatcgcctgcataagtattctaatttgtcttcagaacctgagaaagaaccgggaactatgtttaacggattgagcatccgccgtcaaagtaaaaatttctgtaagaatatgttaatgggatattacccgggcgaaaagaaaaaaccgccttttatgtttcatcgcaatccttttatttttcattgatttaactttggacagaatgggagaaacgcttaacggatgctcaatccgcttgttgccagtaccgtggaaagggaaggataaggtctgtctgcattttggaaaaagcagcgttaatatcatggaacgggtgttttctccgaaaaggataatttgtttttcattgacttgtaaaaagtgggggataaggttctgattctgccggatgtgctttcctggaaaaatgaatcatatcctgcgtgtttttgacccaatttatctgcgatgaagctgccatcattcattaccgccggaaggactggaaaattagtaaggggaaagcattggtgggtgacggaagtccgatgctgcggcctgaaagtgctttcttcctgcacggataggaaaaagcgtttcatccgttttttcggtattccatgcggacggttcaaggtgggccgggaaggtgaatcctcccaattgggcaaactggtaaaagcttccgttcgggccgaggagatgccccaggcgtctggagtgctgaggattgtgcagcaggccatgacctgttttttgaatgaagtggccgggattcttgaggagggcggttatccgtactggctggatttcgggacgctgctgggcgcggtgcggcaccggggctttatcccctgggatgacgacctggatatttccatgctgcgtgaagattatgaaaggttgagggcgaatgccgccgggcttttcggttcgcgcggtttctccgtcagtatggatccgttcatccagatagggttgccgggcacgttgtgcaatgtggacattttcccgtatgacacggctcctgccgcgtggtctccggatgcgcctgaggaaagggagtggctgctgcgcggttacaaggcatccggaatgcttgattatgaggcagattcctcctgccgttaccggacgcggtgttcctatgaggaaaagatggcgatccgggaccgggtggtgatgggaggacggcggccggcggatggaggaaacattttcctgggatttgagattccttttgccggcccgtgccgccattccttccgccatgaatggctgtttccgctttcccgcgtccggtttgagggaagggattttccggcccccaggattcctgaaatggtgttgtacggccagtacggggactggggagtgctgccggattctccccctgtgcattttgatttgaaccacatttccaaggaggttctggccaggatgatgtacatgcgtgatacggggcgccttcccgggcgcgattaaagggccgcacccttttcttcccccgcagggagaagcccttctttcttccttgaccctgctgattgaggaggggtatcatcagataatgagaagacccccgatacccggcttggtgatggcggacggatggctccagccgtattcccgccagatacgcgaccgccagcgtctgtttgacctgaaaatgaagaggatcaatcagcgcgccggctctctggaggaatacgcgcgcggataccgctattacggtttcaacagagacgcggagacgggggcgtggacataccgggaatgggctcccgccgcccgcagggtgtccctgattggggattttaacggctggaaccgggagagccacccgctggagcggaatgagcgcggcgtgtgggaaattacgctgccgcctgatgcgctggcccacgggcagaaggtgaaggtgcacgtggtcggtgcggacggcacgggcagagatcgcattcccgcatggattaccaggaccgtccaggatccgaccacttatgattttgccggggagatctggatgccggaacacccctatgaatggcggaataacggttttgatccctcccgggtggaagttccgttcgtgtatgaagcgcatgtaggcatgggcggggaggaagggcgcgtgcatacgtaccgcgagtttgcggacgaggttctcccccggatcgccaggctgggttacaataccgtccagctgatggcgatccaggagcatccctattacggttccttcggctaccacgtttcttcctttttcgccccttcctcccgtttcggcgagccggaggacctgaagtacctgatagaccaggcgcacggcctgggcatcgccgtgctgctggacgtggtgcattcccacgccgtgaagaacgaggcggaagggctgaacaattttgacggttccggaggcatgtatttcctgcccggggagcgcggccgccatccggactgggattcctgttgttttgattatggccgggacgaggtgattgaattcctcctgtccaatgtccgctggtggctggaagagttccgttttgacggcttccgttttgacggcgtgacatccatgctgtatttccaccgcgggcatgagccgttcggggatttgggcgcctacttcggctcttccgtggatctggatgccgtggcttatctgcagctggccgccacgctgattcagcgggtgaagccgggcgccatagcgattgctgaggacatgtccggcatgccgggattgtgccgcccggtggacgaaggggggattggtttttcccaccgtctggccatgggcattcctgattactggattaagctgctcaaggagaaaaaggatgaggaatggagcatgggcgatatgtggcacacgctgaccaacaggcgctacggcgagccgcatgtggcctattgcgagagccatgaccaggccctggtgggggacaagactctggcgttccgcctgatggatgcggaaatgtactggaaaatggccgtggaccagcagagcctcattattgaccgcggcatggcgctgcacaagatgatccgcctggtgacgctggctaccgggggggaaggctggctgaatttcatgggcaacgaattcgggcatccggaatggattgattttccgcgcgaaggcaacggctggtcttacgaatactgccgccgccagtggtccctggtggacaatccttccctcaggttcaagttcctgaatgcctttgaccaggcgatggtccgcctggcgcaggaagcccggctgctgaataatccgccgcctttcccgcttaatattgacgagaccaaccatgtcatggcattccaccgcggcggtctgttgtttgtgttcaactggtccggagacagggctatcatggattacatgctgcccgttccccagaagggggaatggcgggtagtgctggatacggacaacgcccgtttcggcggtttcgggaggcaggatgtttccatgccgcattttacggatggggacgggaacctttccctgtacctgctgccgcgtacggccctggtcctgaagagggtaggttccgccgtcatggcccgccacccggggcgggaggattagcgtgcaattccaaaaacgggcggtttatttatccgtttgtgaaagggagcgtagtgcggagctgcgtacggaacgcgggatggatatgcgcttttactcccggaaagtgtccggacggcaggctgttaccactgcgcgggaagttcccgcaaggggggcgctcctgagtccgcttttttcaggcggatggtcaggatgtctgttttaaagtctttggacttctcgttgttgcggccccacaaaatggcaccttgcgtggtcatttccggataaaacgttttttccgtggaaaggaagcccggtttatccgccgcaacatgcacgggcttgtgcctgttcagggagagcgtgacgggggcctggccggcgtagtctccgttcacgcgcaggctggctccggaaggaatgctgcggatggtgatgtcccgggaagaactgctgcatgagaggcttgcgccgcagaatgcggagagcaggagaagatgcgggaaaaggccgtgagtcattgctctggaaaaaatcaatgatgttccgccattttcatggcggcctgcttgatctgggccgccatggagttgagggcgttcgccctggtgggcgccaggtggtccttcaggccggttttgtccagcttggacatgtccgccttcagaatttcttccggaggcaggccggaaagcagccggatgaagacggcaatgaggcccttggtgatgagggaatcgctgtctgcgtacagtctcagtacgccgttgtccggttccgtgtgcagccatacgcgggattggcatcccttgatgagggagtcctccgttttgtaggcttcatccagtctgggcaattttttacccaggctgatgatgtattcgtagcgttccgtccagtcctggaacaaatccagttcatccagcaggtcttgcaggcgttcttcgtagttcatggctcggagattgggtaggatggccgggcgggttatccccggcgggcgtctgcaagcgtggcgagcacggctttctgggcatgcaccctgttttccgcttcccggaagataacgggagcaaaatgttccagcacgtcttccgtgatttccttgccgcggtaggcgggcaggcagtggaaaacggagtggccggaggcggcatgttccagcagctccctgttcacctggtaggggtagaagtgtttttccttggacagtccttctgattcctggcccatggaaagccagacgtccgtgttgatgacggaagctcccttgacggcttccacggggtccgtggtgaagatgacgttctcgcagtccagatgcctgcggaagtcttccaggggaaggtaattggtaggggctccgatggcgagcgtaaagcccagcctcttggccgcccacatccaggagcgggacatgttgttgtccccgtcccccacgaaggcgattttcatatccttccaggaaccggggccgtagatttcctcaatggtaagcaggtccgccaggatctggcaggggtgctcctcgtccgtcagggcattgatggtgggaatgccggaaaagctggcgaattcctccacctcctgctgtccgtaagtccggatggcggcgccgtggatcatacgtcccagcacgcgggccgtatccttgatgggctctccacgcccgagctggatgtcatggacggaaaggaacatgggacggccccccagttcactgatgcccacttcaaaggaaacgcgggtgcgggtggaggatttggaaaagatgagcgcccaggtctgccccttcaggggaaggcgttcgtgatggccgcgttccgccttaagccggtggcccagggcgagcaggtcccggatttcgtctccggtaagctgttcgatggaaaggaggttgttcatggtttttgaaagggaataaaaacgggaaagccgcaccatactccctgttttcttaaaagaaaagggaataatgcggctttccagggagggatggagatgcctttacttacagcctggccgccgcctggtccggccacggtacgggagcgccttcacgggctccggcgggattattcttcttgtaggtgggcatttgggccttgcgctccttgagcagggcggtcatggtcctggccatggccttaacgcgttccggctgctgttccgccaggttgtgctcttcgctgatgtcctccttgaggttgaagagttcgaacttctggtcagggtgccagtagataagcttccagtccccctggcgcatggccgtgctgggggaataaagggagttgtttccgttcccttccccccatacgttgggcgtgtggaagagcagggggcggttgggattcatgctgccgcctttcagcagggcaacaaaacttttgccgtccacaacctgaggcgcctgaattttttttgctcccgctatttccagaatggtggggaaaaagtcttcaatgatgacgggagtagtgcagacgctttccgccttcgtgaccccgggccagtagacgatcatcggttcccggatgccgccttcccggttggaacccttgccgaaactaagcgggtaattggattccttgttgcccatgcgcccgctgatggcaaggcccccgttgtccgccatgaagatgatgacggtatttttatccagattgttttttttcaggtattcccggatgtcgcccaggctcttgtccatcccctggatcagggcggaatagcgtttttcgttgtcggaccatttgtggccgtcattggggttggagtactcttccgcaaacctcttgtcataaccgcgcatgtcgaagggggcatggatggcgtagtgggacatgtacaggtagaaaggtttgtccgcctccctggggtttttccggatggcgtccaggcgtttcagcgcctcctgcgtcagggcttccgtcaggaatgtgtcgttttcatagtaattattttcatccagtccgcggacatggaaattccccgtgccgtatttccgggaaccccggtagtccgccgggccgcctatttccgtgccggcgatattgtagtcaaagccgaagagcctgggattggctccgggcgtatttttggagccgaaatgggcttttccgcagtggatggtggtataaccctgttttttgagcagggcgggcagcccaagcacctgggtgaagggtttttccatcctgtattggattttttcttccgtcaggggaagatgggtggttccggatgccctggtccctgccggctggatgccgttgacgctccagtctgcgggagctttgagtgcttgatggcctgcgtccgtggtttggtcacgcaggagcgtccagttcgtgacgcggtggcgggcggagttcatgccggacatgaggctgcaccggctgggggaacagataggctgcgcgtaggcgttcgtgaagaccatgccctgcttgcccagagcctccatgttgggcgtgcggtagcgcttgttcaggaaagtaggtttgggagtgccgtcctcttccctccaaaagggcagggatgtatcctgccagcccatgtcgtccaccagaaagaggatgatgttggggcgtttcggttctgccgcgcgggatgcttttacggaagctgcggaagcggagcaggcgcttcccagcaggaacgggatgagaaaggctgcaatacgggaaatattcattactaaaaagaccagtgcttataataacgcatgagacggacgtttctgtcaaggattcgtattcccgcggcagtttgttcgggaacgccccgtttttccggtgcggcgtgtaccgggatgaaagagccttattcaaacagggccggataggatttccgggccagggccgtgctcaagtccacgataaacctgctgttgggggcctggagcgccttttgcgccatgtcccggcactggccgtagtccagattgcgaatggcataccggatgatggggacaaggtgaacccccacggacatggaggtggcccccaggccgatcagcaggggaagcagggtgatgtcccccgccatttccccacagatggccgtgggaatgttttcccgttctccggcggtgatcgtcatgtccatgatgcgtatcacggcaggatgcgtggggcggaacatattggcaacgcggttgttgacccggtccacggcaatagtgtactgggtgaggtcattcgtgcctatggagaagaaatccacctcgcgcgccagcacgtccgtcatgatggcggcgctgggcacttcaatcatgatgcccactttcaagtcccgcgcataggggatgttcttcctttccagttcttcccggcattcctggaggatgtgcttggctgtgaccacttccgtatagccggagaccatggggaacatgatgccgcagccgggcgtgtccgcgcaggcacggagaatggcccggagctgctgtttgaacagctccgggcggctgagggagacgcggatgccccgccagccaaggaaggggttcggttccggagtgcggagctgttcgcacggcagcttgtcgccgcctgagtccagggtgcggaagatgacgccgtggggggaacagccttccgccagttttctgtagtagcgtgtctgttcttcttcatccggcatgccggatgggttgcccagcagaaagaattccgtgcggaacaggcctaccccttccgctcccacctccttgatgccggaatattcatgggggaactccacgttgacggacaggcggatgttgcgtccgtccctggtgatggtgggcaggccgcgcagcgcttccagcgccttgtaggccttttccttttccacctggaggcggtggtagtattcctccgtttctttcgtgggtttcaggatgagcacgcccttgtagccgtccaggatggcgggggagtggctttccactctcagaagggcctggtcaagccccacgacggcggggatgcccatggagcgggcgagaatggctgtgtgggaaacggaggaacctatttccgtggcaaagccgtgaatcaggctggcatccatggcggccgtgtcggaaggggtcaggtcgtaggccaccagaacctggtctttttccgtttcttcctcgtcttcaggaggttccgtgctgcggaggttgttgatgacccgctgcatgacatcctccatgtccgccgttttggcgcgcaggtaggggtcgtccacacggcgcagaacttccatgtagttctgcatgaccacataaaagatgtgctccacgttctggaggcgcttgagcagttccgtctgcacctgctggaggataattttatcctgaaggagaaggatgtgggcgtcgaagatggaggcatctttctctccggatatctggatcatgcgttcccgcagcgtcctgatctggtccgcagtggtttgcagcgcccggtggaagcgcaccagctcggcatccacttcttccggggaaatatcgtacgctacgggttccttggaaccgctgatctgaattttaatcttgcccagagcaatgccgggggaaacgggaatgccctgaagccaggtttcttccgttgaaatgggttcctgaatcatctgcgggcttaatggcccggtctcatatggccgtgagccggagtgttcaatcttcttcaaacttgcgggaaatcaggtcttccagcgcattcagcgcttcctgttcgtcctttccttccgccgtgatggtgatcttggagccgtggcctaccgccagcatcatcaaacccagaatgctcttgccgtcaacttcctcgccatccttctccacgacaatgtctgcatcaaatttgctggccagtttgacgaattgagcagccgggcgtgcgtgaatgccgagtttgttgatgatggtgagttccttggtgaccatggaatttgaagtaaggggtgataacggttgctacaacggtaagtacactaattaaagtttttttccaagagttttttgtcagtcctagttttcggaggattggaagtttgacatgaggcggcggttgaactccccggccatgtcgatgcccatgtccttgagatgatagtccatggcggctacttccaccagcctggcaatatccctgccgggagccacggaaagctgaacatggagcactttttcccctaggacgtccagcccctcccgctccaggccaagcctgtccagctcttcctggtccttggcgggaatgagggtgacgatgaggtccagacgcttgttgtggcggatggatttcaggccgaaaagggtggtgatgttgacgatgcccaggccgcgcacctccatgaagccgcggctcatttccggagcgctggccaccagttccccgcccacgttgcgcacgtacaccatgtcgtccgccacgagggccgcgccgcgttcaatcaggcccagggccgtttcactcttccccacgccgctcttgccgcggatgaggacgcccacaccgcgcacgtccaccatgcagccgtgcagggtgacgctttccgcgaattcgttttccagaatgatggtggcggagttgacgaatttcatggtcaccaggctcgtgcggaagacgcagacgccggcttcatccgccagctccacgatttcccgggggggaattttgtcacgggagaagacgatgcccggcacctcgcaccggaacatgcgctgaatgcgagatttgcgcatgccttccggcagtttttgaagataggccagctccgcggagccgaaaacctggatacgtttgttggcaaagtaggagtagaagccggcgatcgccagcccggggcggttgagggcgggttcgcagatgtggcggctgaggccggcggggctgttgataagttccagttgaagggcttccttgtacttgccgtaaaatttggacagggtgacgaaatccactttcttcactttggatttgctgaacataatcctatataaagaaacaaaacacacgcgagagcaatcaaatattgttcccggcgccatgtgcgggctccattttttgaaaaaaggcccgttccggcatggaatgccacactttaccggttgatttgaagccccaggcatggtctgatgaaggcatgaacagactggatcaattagccaccttgttgagatttccaagcatttccgcacagaaggaacacgcccgggacgtgagtgattgcgcggactggctggtagacaaattgtccggcatgggattggaagcaaaggcctgtaaaacgcccctccatcccattgtgctggcccgcagcccgcgggaggaaggaaagcccaccgtgctgatttacggccattacgacgtgcagcccgtagatcctgtggaattatgggaatccgacccgtttgaaccggaagtgagggacgggaagatttacgcccgcggcgctacggacaacaaggggcagctgttcgcccatattctgggcgtggaggaattgctccgccagaacggaggccacctccccgtaaatgtgattttccttctggaaggggaggaagaagtgggcagcggcagtctttcccagtttatcaaggagcacagggaagagctggcctgcgacgttattgtagtttccgataccggcatggccgctccggacacccctacgttttcctacgggctgcgcggcctggctggggcggaaattatcgtcaaaggcccttccgcggatcttcattccggcgtgttcggaggagcggtggccaatcccatcgccgctcttgcggaaataatcgcctccttccacgatgaagaggggcgtgtggccgtgagagggttttacgacggcgtggaacctatcgccacatgggaacgcagcatgtgggccacggtgcccggcatgagcaatgaggagctggctcagctgacgggcgtggaaaccgtggtgacggaggccggtttcaccggagcggaatgtatttttgcccgcccgacgctggaaatcaacggtatcggcggaggttaccagggtgagggaagcaagacgattatccccagccatgcctttgccaaaatttcatgccgcctggtgccgggacagcagcctgaaaggattgaaaccctgctggaagaacatgtaaagaaacattcccccaagggcgtcacggtggaattcaggcggggccatggcgggaatgcttacgtgtgcgatccgaattccgagttcggtcttgccgcccagcaggcgctggaagaggcttttggccacaaacccgtgctggtaagggaaggaggcagcatcccgatcattgaagagatgaagcgcgtgctgggagcagatgccctgatgctgggcatgtgccttccggatgcccgcatccattcccccaatgaaaactttcccgtggatttgttctccaagggcattgacatgagccagattcttctgcgccgcctggggcagatcaagcattgacctttttatggaccagcctgtagccgctgaaatagtcaacctgcacaagacctttaaaacaggtcttggcaaacccgtggtgcatgccgtgcgggggatagacatgaatatccggcaaggggaggtatatggcctcattggcccgaacggttccggcaagtcaaccctgatgaaggccctgctggggctggtgaggcctacggaaggttcctgttccattttcggcaggtccagcctggctccggacagcaaggaggaagtgggctttcttccggaaaatccctacttttacaaattcctgacgggggcggaaactgtttccttttacggcaggctgtgcggcctgagcggaaaatccctgaaagagaaagtcagggaactgctggagctggtgggattggctgatgcggcggacaggcggctgggcggctattccaaggggatgctccagcgcatcggcatggcgcaggccctggttcagtccccccgcctgctggttctggacgaaccgaccgccggcgtggatcctctggggtcgagggatatccggaacattatcgaaaacctgaaagggcgggggatgaccgtattcctgtgttcccacctgctggaacaggtgcaggaggtttgcgaccgggtgggcgtcatttttaaagggctgctcattgcggaagggtctgtgaatgagctgacgcgggattccgacaagcaggaaatacttctggaacatgcttccccggaattgatggaacggctgaaggagatggtgaaggaagacggccgtgccgtttggctggaggatgggcatccgcgcaactccctggaaagcgtatttctaaaaagtttgttggaatggaaggaaaagcatcccaatccggaaccgtaagcggtccggcggctgccaaacgggaagtgcgccgcatgatacgtgaaagggtgggcggattggatgacgccgcccgggaagccatggcccgttccatctgccgccgtgtgtcggctctggtgcgggagaggaatttccggcgcgtggctgtttttgccgccaggccgggagaggtggatttgctttccctgctggatctgcttccggaccgggaatggtacttcccgctggtgcatgaggggagaaggctgagttttcaccgtatatgccatcacggggaattggtggcgggcagctggggcatacgcgaacccggtccgggatgcccggaactgcatgcgggggaaatggatttgatcgtgctgcctggggccgcatttactagggacggcaagcggctggggtatggcggcggattttatgatacgctgctggccggcccggctgctggggtgccgctggcgggagtctgcttcccctgccagcttctggacgatctgcccatggaagcccatgacaggcatgtggacatggtgattgcgccgggaggggagtaacagtaacacccttccggagaaaggggaagaggctagatacggaaccggtgtttctgcacggtcagtttataaaacaggtcgtagcgggcgttgagcaggggctggaggtattctacccctccggctacctggccgcggatgtccgcatacagttttcggtagtcggaaagtccgctgatcatggcttcatacaggggggtgcgcaacccgcattccacggcaatgtgcatttccgccgctgcggccacgatctggcgggacaggcggaactgcatccaggccagccccaggttgccgcccacccagacggccagggccgcgcctacgcaggcgaaccctgctgcgtgctctccgaaacagcccagcagggctcccagaatcaccagaaggagcatcagcttgatttccgtcctcatcacatcctcctgatccagaaaaagcttgctgaggcacggcttgatgccgaagtccttcaggggcatgtaaatggaacgtcccagcctctccttgtacacttccagatccgtctggagctttgcggccgggaaatcccctatgtcgcagtcccattgttccttcacgcgcgggcgcacatggttccagtgcgtctggcagatgttcaggaattccttgttgtaatacgcgtgccgttcctcaatgccggatttgaccagctcataaaaccattcgtcaatgacgggaggaagcttgtgcaggatcatcgtgcgccggatggataggaaacgccccatctggcgtgccgactttttccccagacgcggcacgcagtcctgcacgtattgcgcgtacgccttgaggcgtgccggcatttcatcctccatctggagctggatgcggtcgatttcccggtcaatagacgtcaggaagccggaatccatcttggaaaggcggctcagttcatcaagcaccttcccctgttcttccagaaggctgtccgtagccagcaggaggcgttccacgcgcttgtccgtcagcgggctgcgtttcagcacttcctgaacgcacgccgtcagggcttccactccttcccctgcatgctctccggcggtcgtgacagggtacaggggcagctgcacgcccaggcattcccgggaggtggagcgaagctcctctttcaaggattgaagcttctcaaaggagagcagctccgcatgggtgatgacgagaaccatgcgggaatggagacgttcctccagcgtccggagatagtcccacagggcggaatggttgccgtcactggcggaaataaccacaaggatggcatccgatttgggaacgatgtgcttcagctttctgggggcatcctcctgttccaggccgatggtatcccagaactccaggttgagcagggcgtccgacgggtaaaaaaggtccagaacccattcatgggtgtgtggggcgggatgaggcctgtactgccagcggaccagtgtggctttactagacacgcgggaacagaaccgttccccggccagggcgtccagcgtagaggatttgccggaccctgtcatgccgatgacggtgacattctgcggagagcagcattcggccagggcttcctccaccttttcctgggaatcgaaatgacggtcggggccgatgcgggcggaaaacgccgcggcggcatccgctacgtcccgcaccgcatgcggaatcacgttttttcctcctgtcagcatggggtgatgaaatcaggtctccgtccgggctgttccggttttccggaacaaacctacacgccgcttttccttctgtccaactaaaatcacgaagcgggagcgtacgagcggccgccgaaaatggccgtccctacgcggacgagcgtggctccttcctctattgccgtttcaaagtcgtggctcatgcccatggacagttccgtcagcgtggctcctcccctgccggacaggacttccttcagctcccggaggcggcggaaatagggccgcgcctcctccggattttccaccggggggggaatgcacataaggccggcgatttcaagatggttcagggaggacagctccggccattccttttccagggtttccgggaagaatccgaacttgctgtcttcattgcctacgttcacttccagcaaaatgcggggacgttttcccgtttcctgagccacgatatccatgaaccgggccaggcgcagggagtccacggcatggatcagcgtgaaatattccagggccttgcgcaccttgttgcgctggagggggccaatgagatgccattccgtatccggaggaagggaggggatttttcccagtccctcctggaccttgttttcaccgaaaatgcgctggcccgcatcatggcacgctttcacatcctctgcgggaaaagttttgctgacggcgacgaggcggacggaacctgccggacgtccggcgcggagttccgctgcgcgtatgcgggagagaatatgttccagattttgttggatgctcatgatggatggttcagttcagggatggctgtgcggacgcgtggctcatgatatggtgcaggggagagagccgccgcatggccatggcccagaccttggaagaatccgtttccaggcaaatgtccggcaccatgggggaaacataccaggcacggtcattcagttcccggcgcagctggggcggcgtccatccgctatggcctacgtaggcgcgcaggatggcgcgggggtcttccaggtattccagggcctgttcctcttgcagatgaaactggacgcgcaatttatcctccgtgcggatgaaagcggcgaagatgagctggttgcgttctacgggccctcccttgaagatgggcacggcgtaaagggattccggtatttccgtatggcgggctacgtcccccacattcatgccggagggatgattcaaaatatggccgatgacaaattccttctccgcccggctcaggaagatgacggaatgatggaatccggcgccatccaggtagggggcggcaaccagaaggtgccccgccaggttttcattgctgatatcttcgtgttccatcatggccataaatctacgttaccaaatgtgacggatgcaggcaaccatgcgttcaaacggccatgtcaggaggcggcgaaaacggaacaccggaaaaacaggagggaaggggagcttttacccgagtgtatagcgggtccctccagaggaacggacggcggttcttgaatttccggacgtcctgcgggcgaccgccctcctggagggaacggattttttcccggttgatgccgtttgcttgcgggaaagggcaacggcgggggggcgggaagccctgcggcggtgggaaatgacggaggccgtattggcgttttccatgcggtctggagcggaagccatgaccagcagggaagaatcctgcattttttccgcctgggccagggctttcagggacgcgtcaatggaacagcgttcgattacgaccgggtctccggtacggagcaggttgaaggcctcatatacgtcattgctcgtcatccggacgcagccgtaggaggcgggggtgccgatggtgcgttcctccgctgtaccgtggatataaatcaggcgcgagtgagcgttccggttacggggttccaggccttccagccacatgatgcgcgtgacgatggggtcccggcccggagaattgggcgcgacgcattccccggtgggcttgcggcttttaaacaccatgcccttgggctgtccgctgccgattttggaagcgatgcgatgggcgcccagaggagtgcggcagcttccctttctgtctcccaggccgaatttggaagtgctgacagggtaggtcttcaccacccggccattgcgcatgacggccattttctgatccctgacgctgacgaccgcgccgtctttcacgatggcggtgggctcataatccggacgggaacaggatgccaggactccgaacacagcgaaagctgcgccggcgagttgaatcaggcgtgctgcttgcgagagaggcgcaggcatgggaaaggcgtcagttcttggctttggcagtttgcttggcgggcagcaggttggaaatcatgcggcccagggaacagaaccctgtgtaatagaaacccaagaaaggaatcatcaggatgggggaaaggtaatggccctggcggatcatgatgatgatcaggttcaggaagaaagttccgcaggcgatttccaggacgggaatgacgacggatttaatagcccggtatccgttgcgtttgagctgggagacgtgccggcggtcttccttccggtccacgccgtatttgggcgtgcggacgaaggcggactgatggccgaagatggcttccagaacagccttggcgttgttgaccgccatgcccacgctcagcgtgagaaggagggggaggtacggcagttccttccaccaggatttgggacgcaccacgatttgggcgctcatgtaaaagatgcagacggccacgctggtcatgaagaacagggccacattcacaaaccacatgaagaccgtttcattttccggaatacgctgcgtgcagatggggtacaccaggaagcagagcaatgccaggagcaggtaggaataattgcaggtgaggtgggtggtggcttctaccttggctttaaggggggcattggagcgccagatgtccagcaggattttctggcagacctgaatggaacccttggtccaccggtgctgctgggacttgaacccgtccatgtccacgggaagttccgccggggtaacgacgtcgttcaggtagatgaagcgccagcccctgagctggacacggtaggaaagatccatgtcttccgtcagggtgtcatgggaccatccgcctgcgtcgccgatcacgcacttgcgccatatgccggcagtgccgttgaaggtgaagaagcggccggaacggttgcgagccgtctgttccatggcaaaatggccgtccaggtacatcccctggatgcgggtaaggagattgtattcacggttgatgtggccccagcgggtttgaacgaggcccacgttttcatccgtgaagaaatggatggttttttgcaggagatccggttccggaacgaagtcagcatctagaatcagcaggaattcccccttcgctactttggtagccgcttccagcgcgcctgccttgaagccggtgcggtccgtgcggtggatgcagacggcgtcaaagccgcgggactttaattcctccaccttgcggtagcattgttccgtggtgtcgtctgtagaatcgtccagaatctggatttccagcttgtcctgcggataatccagagcggctacggattccagaaggcggtccacgacgaacttctcattgaacatggggagctggaccgtcacgacgggcagttcctggaagcgtgctttgggctggggcttgttattacggttcttccagtacaggtaaacgatgctcaggcggtggaagccatatcctgccaggccgacgaggaccagaagatagcacaaaagccagataaaattgtaatttaaagacatgcagggggtacaaagggggttggtatctttttgcgtcagggaagggggatttccttgacgtgacgcccgtataggacaccatagggcgagagtcaagacatattccgttttgcttaacctttttgagtgttgttatgaagagattgtatctgctggccgcagctgtatccgtcacggggggaatggcgttttccgctccacaagaagatgccccggagaaggaggcggcagtactggatgtgcaaacgccgccgtccggcaagcaggaccagccggccattccggaacgcctgctggacgactcccacatgaatgaggagctgggcatcaacgaatttaccgcgccgtccatccgcaagatttttgaagatttggaggggcttcctgaaataccggaaaaggtggccttgcgcgcacgcccggagcggcctcccatggaccgctgttccctggctctccagttgggcggcatgatggcggacggcttcgtaatcgtgcagtgcggcaagatgaatgaggtgaaacccattgctctggatctttccagctatgcaaaggccattggcgccggagagagggtgaaccgccacgccgccagcctgctgaaaaatgcggaagacggggatttgagcagtttcaaaaacaacctggcccttattcaatccgatgtggaacaggaactcgcctccctgagggattccgatatggcgaacctgatcggcctggggggctggatacgcgccctggacgccgctaccgcggctctggataacaaatttgcggaggacaaggcaaaagtcattttccagccggatgtcccggaatattttcattatattctggacggggtggagccggaaatgaaggaacgccgggacattgccaaaatcatgaaccttctgacggtcttgcaggagcagatgacgctggctccggacgccaaacccgtcaaggccggcgtggaagccatccgcaaaacgacgctggagttgctcaaggcggctctggcccctgtggaatcataattcctctctccggcaggcatacatctatggttcttccccttttgaccagtctggaagtgcgtcttactccccgcagcctgtacttgcggaatgaaaaactggagcggatgattcgggatgatggccgcatcccggtgtcttacaacgtaagcatccgcaatgcgggagacggtgccgtgcgcatcatcggcaaaaagtggaccgtccgttcccatgaagacggcacgcaggtgattgaaggggatgaattgttcggttcacgtcccctgttgtgccagggacagatttttgcgttcaacggccttcagatgctgcggctgccggcgcgcatccagttgactctccttgtccgggacgaggcgggaatcctttatcatacggatcccgtcagccttaaatggtgaaataaaaagccctgcaatattcatgcagggcttttttctggataaggggtagaggaagaatctgaggataaaagtctataagttaataaaactgttccttaattcccactccctctaattgttgcttccgggctaaccttcttcatcatccccgtggttgaggatgaagttcaggtcgtcaatgcccaggctggaggtaaatccttcgtcacccagcacgttggcgacgagctggtttttctgatgctggagaatgcggattttttcttccacggaatccttcgtcagaaggcggtaggcgatcaccttgtttttctggccgatgcggtgcgtacggtcgatggcctggctttctacggccgggttccaccacgggtcatacagaacgacataggaggcggaagtaaggttgaggccggcgccgccggctttcagggaaagcaggaagacggaggggtccttggtcgtctggaatttttcaatttctccgcggcggtccttggtctggccggtaagatagttaagcggcctgttttccgcttccagcctgttcttgatgatttccagcatggaaacgaactgggagaagacgagcactttgtgcccttcttcccggagctggtccagcaggtagaagagggctgtcattttggcactgtcttccttggcgtatttgggatccaccaggccggggtggcagcagatctgacgcaggcgcatcaggccctgcaaaatggcgaaactgttctttttgacggattcgtccgaatccaggccgagcagggcctgctgaatgcggcggagttccgccttgtacaactggctctggatgccttccattttggcgtacacttcttcttccgtcctgggaggcaggtcttttgccacctgggatttggtgcggcgcagcaggaagggtttcaggcgcgcggccaggcggttctggctctgcgggtccttgcgcttgtcaaagcgcttcttgaagtaggagcgggaaccgaggactccgggcatggagaaggccatgagggaccacatatccagcaggcggttttcaatgggtgtgccggagagaacgagacggttgtaggaaacgatttcccgtgccgccttggctgccttggaatccgggtttttgatctgctggccttcgtccagaataaccgtaagccatttgatttggttcagggtttccccgcagacgcggagctgggcgtagttgaccacgaccatgtcgtaattcttcttgatgtcttccagattggcctggtccttgctgcggatgacgaggacgcgcacgcctggcgcaaatttttccgtttctcccgcccagacgtccagcacggatttggggcaaacgataagaaccggagggatgacgacttttttcttggatttgtttttgcgggcgaattcttcacgcagccagaggacgtaagtgatggactggatcgttttacccaggcccatgtcatccgccagaatgccgccgaacccgttcgtggcaaggtaagccaggaaatggaacccttccacctgatacgggcgcagggtggcctggagctgggagggaacatccggcttgacgtcgatctggatttccgcggtacggtccttgatgcgtttccaggcctttggatcgaacacttctgcggctttcgggtccgccagctgcatggcgtgcatgcggtgggtttctccggaaagatcgaaggggtccaggcccaggcgggtaacggcgtcgcgctggtcattgtccagtttaatttccaagcgcatccatcctccgtcgtccatgcggacgtaaccgcctctggcggcgaccagggcgcggatttgctccttggagagctggacgccttccacatcaatgacgatgcggaggtcaaaccagtcgatttcctggttgactacttcaaaccgcacggcggcggccaccggatccgccagcagcgtcttgagcttgtcgtccatattgacggtcagctctttcggaagctgtttggcccattccgcgaatttttcggggaactggcgggtgacgcgggccttgaacgcgcccacctggggatcgtaggaaaagcccatttcttccagcaggccgggaatgggataaaggtgctcccggatgaagcgcagcagaactttgttcttcatgggctcctgatgggatacgtcccagccgtccttgccgagtttttccgtgcggtagccggaagcgtccctggcgcttacttcgcagagcacgtgttccgtttccgcagaggtgaggccgcggacgattttcatgtcaaaggtgccgcgcaggtcgatgtccaccacgcggtcttccatgctggggggcagggaagcgcctattttacgcaggaattccaccccttcaaggctgtcgatgacctgcttgggaatggagtagcggggttccacttccgtgctttccagccagcggggggggccgggaaagacggtttcgtcagactggtacagttcctgctgccccggaagctgccggacggagtgggagacgttgatgccggtggaagttgcaagctgaagagcgtagcagtccggttcaatgggatcgtcctggcaaatccatttgagcggttcgtccaccactttgaaatagttttcatcaaggttcaccaggtagcctttcagggcgggctggtggaaaagtttgttcatcagggcgcatgcggcctcctggtccagatccagcgtcagggcgtcttccgcacgggcgtagtcggacagggagacgagcaggatttccgtctgggcgtccatgcgtacggcagcccgttcatgcagattttccaaatgttccagatcctgtttttcccggacgggaatccagtcctgcttcagggaatgacggtattcgaaatgtccctcgttaatagtggaaacaagcctcatgaacagttctccgcggggcggctgcggggggcgttcattcacggattggatgcggtcgtaccaggtgccgacttcacgggagcgctcccattcatgaatcttgcgctggaccttttccagatccgtaatggattccatgaattccgggtagggcaggcgtttcttgttgaaggcgtaagcaatgtaattccagaattcgaggatgtttgtgggaggcacgggccacaattccagcgggtcatagctgacgatttcccatcggggattcaggcgcaccatatcatggtcgtgaatctcctgttcaatggcgaaacggcggtagcgcttttccagtttgctgacgtagtccgcttccttgtcgtccagttcgcgtcccagtttctcttccagaatatccagaagaggaacatcattcagttcgttcggggattccggaaggtcctggccacggtacatgcgctccagcatggcggcatacatggccgctccggccagatcctcgtcttccgtggaacatgctccgaaccacctgttgccctgaaggcgcagattcacgcggtgcacgccgtatgtgtcttccacgcggccctgaatatataaatgattgccaaaaatttgcgtgactgcgccatctttctggagcttctcgccgcgcagccggatttcttccggaaaggcattgagaaagttcagagtagccctatccgggttaagtgccatgctcataatatcagactgtcatataaaaattggaaacaagcgttccctgttaagggacgctacaggtctatgcactttactatggcacaaaaagcggattagagcaactattctctgaaaataattccaaaggttgtttgtgatgatgttcacgatgttgaatgacaaattgttatgtctatatgaagaaggccggttcttgaagaaaacgaacatattttatcatcttggaaagaaaggatgtcagttttgcgtaacatggttcttgacaggttcgccgtaaaagcgtcttttatgcctgaaattttatgtcctctgcatcacttctacagttactggcgactcaagcccgcttgagcgatggcgaattggccgaacgtcttgacatgactgaagaagccgtgcgagcccagcgggaacagtgggaaaaggaaggcgtcatcctcggataccaggccgtggtgaatgaggaatatgaacacgacagcaaggtggcggccttcattgaagtgaaaatgacgcccgaacgcgacggcggttttgaccgtctggccatgcgcatctcacggttcgacgaagtttcctcctgctatctggcaagcggcggttttgacctgctggtgctggtggaaggaaaaagcatgcgggagattgcccggtttgtggcggaaaaactttctacgctggaaggggtgttgtccacttccacacacttccatctgaaaacctacaagaaaaacggttgtgtgtttgaagctcccgtgcagacagaacgcctggctgtcgctccgtaatcctctgccgttaagaaaggaatgatcatgaattggcagaacaaaatagcggagcaggtaagctccataccccgttccggcatccgggaattttttgacctggtcacgggacgcacggatatcatctccctgggcgtaggggagccggacttcgtgacgccgtggaatatacgggaagcggccatttactccctggaaaaggggcacacctcctacacttccaactatgggttggaatccctgcgccgttccatcgtcaaatacgtggacggattcttccatgtcaactacgaccccctgcgcgaagtgctggtgacggtaggcgtaagcgaagccatagatctcgctctccgtgccattctgaatccaggggacgaggttctttatcacgaaccctgttatgtctcctatgcccccagcgtcaatatggcctacggcgtagctaccgccgtgcctacaagcaaaagggatcttttcgccctgaacccggaggtgctggaagcgtccattacaccgcggaccaaggtgctgatgctcaacttcccgacgaatccgaccggagcggtggcccctgtggaaacccttcaggaaatcgcccgcatctgcatcaggcacgacctcatcgtactgacggatgaaatttacagtgaactgcgttatgacggcaagccgcatgtttccatagcttctctgccggggatgaaggaacgcacgctcctgctgcacggattttccaaggcattcgccatgacggggttccggctggggtatgcctgcggtccggaaccgcttatttccgccatgatgaaaattcatcagtattccatgctctgcgcccccattacttcccaggaggcggccattgaagcattggaaaacgggacatccgccatgttgaagatgcgggaaagctaccgccagcgccgggattacctggtgaagcgccttaatgaaataggcatggactgccacctgcccggcggcgcgttctatgtcttcccggacatttccagatttggcctgaccagcaaggagtttgccacccggctgctgatggaaaagcaggtggccgccgtaccggggaccgccttcggcgcaagcggagaaggcttcctgcgctgttgttatgcgaccgcctttgaccagatcaaggaggcctgcaaccgcatggaacatttcgtggaaactctttcctgacccggcagtattcatgaactccgtgacggaggctctgaaaacaaaggcgtatgtggcgccgtttgcggtattcatgggctttaccctggtgtggcagtttggcgttcccttgctggaatgggaccacccggccgcaccctggtggagaagggcgccggaacaatggctgtatcccgttcaggcaatcgtttgctttgccctggttttccggtggagaaaggccattgattgggattggcggtggaaacccgccgcttggggaatcctgttcggcgtgctgggtatcctgtgctggctggccccgaccatgatagcggaccgcctgcccggaggggcggatgcctggtttgggcatctctcctggccctggtaccggtatctgctgggaattgacgcgcgcccggatgggtttgatcctggcgtcgtctttcttgcgggttcctggagctggctgggggctctggtgctgcgcttcttccgtgccgtggtcgtggtggctctggtggaggaacttttctggcgcggctatctgatgcgcctgatggtgaacccggaccatccctggaaggtgccgttcggcacccatagctggaaggcatactgggtgactaccctctgtttcatggcggtacaccagcctgtggactattgcggcgcattcgtttacggttccctggcgtatctgcttgccgtctggcggaaaaacctgtgcgctgtgatcatgatgcatgcggcggcgaatgcgttgctgggatgggccgctctggaatggggtaaatatggattatggtgaatccagcgtttacagagaggattttctgaagtacataaaagccgatgactccagaggaagccatagcaattttatgggattaccatcacgtgaagcaggaactgcgtccggcggaactcatattcattcttggcagcaatgacataagggtggcggaatatgcggcggaactttatgcccggaagctggctcccctgttgctgttttccggcggaatggggcgttttacaggggaatgggccgtaccggaagcggaacttttcgcagaggcggctatgaagaagggagtgccgggagactgcattctcattgaaaacaaatccaccaatacgggagaaaatgtccgcttttcccgcgctgtcctggaaaaagccggcattccggaaccatccagcatcatcgcccttcaaaagccctatatggaacggcgcacgctggctacgctccaggcccagtggccggaagtacgggtggcggtcagctcccctcctttctcgttcagggaatatctgaccagggagctcccgcaggatctggttgtttccgccatggtgggggactttcaaaggatactggaatatcctaaacagggattttccacggaacagcctgtgcctccggaggcgatggcggcattccgcacgctggtggaagcggggtatggctcccagctgctcaagggtgtcccccttccttggaattcttgagaagacacgctttttgcttttactgaatgctgattgcgggcatcaatacaacccgcatagccaacccaattatataacttatcatggcagacagaaccaacacagatcccgcccgaatggaaaaaatcgtgagcctctgtaaaaggaggggattcatcttccagtcagctgaaatttacggcggtctgaacggttgctgggattatggtcccatgggggtggagcttaagcgcaatctgaaagaatactggtggcgtaaaaatgtgcaggaacgcgaggatgtggtcggcatggacggttccatcctgacgcataactccgtactggtggcttccggccatgtgggcggattctccgacccgatgtgcgattgcctgttgaccaaggagcgtctgcgtgcggaccaggttccggcccagagcggcatggggtttttctataccggggccgccaaaaaagacggttcctggaatattgaaaagaagtactccgttctggtggaatctgaaaaacaggcggacaaggcccgtaagaccgcggctcaatattatgcccagctggccggcaaggatgcctcttacaaggatatggagctgaaaggcgagtgcatggaaaccgtaacggattccaccatgtacaatcctgctaacggttctctgctgacggaagcccgtgagttcaacctcatgttcaagacgaccattggagctacctctgatgaaaacgatcccaatgctacgggctggctgcgcccggaaacggcccagtccattttctgccagtataagaacattctggacagctcccgcgtcaaactgcctttcggaatcgcccagatcggaaaatctttccgcaatgagatcaacccgcggaacttcactttccgttcccgcgaattcgaacaaatggaaatcgaatatttctgccggccggaagacgggctgcgcctggtggatgaatggctggaacaccgtctttgcttctatgacgaagtgggggttccgcgcgaacacattcacattttggacgtgccggacggcgaacgcgctttctactccaagaaaacctatgacctggagtatgaattccccttcggcatccaggaactggagggcatcgcctaccggacggattatgacctgagctgccatcagaaaggttccggccgtcctctggaatactttgacgaagagacgcgggagaaattcattccccatgtggtggagccttctgccggttgtgaccgcaccattctggccattatctgcgaagcttacgatgaagaggaactggtggacgacaaaggtaaaaaagacgtccgcacggtgctgcgcttcgtgccccgcatggctccgatcaaggcggccatcttccctctgcttaagaaaaacggggaacaggtgcgtattgcccgggaaattgaaaagacgcttcagccgtggatgtccgtcttttatgatgaaacgggagccgtcggccgccgttaccgtcgtcaggatgaagtgggtactcctttctgcataaccgtggactttgaaactctcggggaaaatgatgcttcgctcaaggggacggtgaccattcgccaccgcgactccatgaaacaggaacgtgttgcaattgaagacctgctgcattggcttattgcccgcatacgttgatgttttttcagcggctttgatgccgaaatgccttcagagccgttccgttgacagcggaacggctttttattttcaaaacagcagtgaaaaaagggggctgaaaaaccgataccgggcgtgatttttccagaagagagcccgttgttccggagtcggtatggctggaggtctgtgcatttttttgatgctgctatgcacggctgggaatggatatttcttatatgttcactggaagcatatggaatgaaatttcaatgagatttattgacgtcccgccagcaaaagagggaaaatgacgggtgaggcggttcaggaaaaacgtcctgatttttgagcttttttttatcctctgctgtcaaaggtttgtacggcatggaatgatgcgatcaagtagaaagaagatattaatgatggaacattcagtaatttttccagaccatcggaaggtttgcgccctggggcagggaacctggaaaatgggaaagtcagcgttgagggaagccgatgaaatagatgctttgcgcgccggcattgagctgggcatgagcgtagtggatacggcggagatgtatggcaacgaggaaatggtgggtgcggcaatccgcggtttgcgcgaccgtgttttcctggttaccaaggtgttgcccggcaacgccagcaggacaggaaccaaagcggcctgcgaacggagcctgaacaggctgaagacggattacgtggatttgtttctgcttcactggggaggtccccatcccattgaagatacggttgcttcaatgattgagctgcagcaggagggaaaaataaaagcatggggcgtcagcaatatggacgttccggaaatggagcggttttacgccgtcccgggaggagtttcctgcgccgccaaccagattctttataatctggcccatcgaggtgtagagtacgatttgctgccgtggtgccgggaacgccaccttcccgtgatggcctattcgcctgcggatgaagggcggctttcccgtaatccggtgctgatggagattgcgcagaagcatgaggccaccccggtgcagattgccctagcctggattttgcgctgccctggaatgattgcgatccccaaagccggttccgtcacgcatgtgcaggaaaattaccggagtttgtccatcaggctgactgcggaagatgtggatttgctggatggggcttttccgcccccgggcagaaaggtgcatctggattcctggtaaaccgtgatgccgtccggcagttggggagaagcgggacgcgcggattttcctgccgcatcaaaattgtttcaagcctttcatctgtccgggatgaaagggcgccagcgggtaatttcaatacacgcacgccttgtgggtagggtattggctttttgttcatgcggccggggaatcttctgacgcgtttccggaaggggacttcccggtttttccctttgaacagaggatgtgccgttttccggttccggcttcttcagtagggaagaagattgaatgcggctgaaagaaagccgcccttccgggaatacggcattccggagaggcggctccagaggaggaggcgggataataaagcgctacagcggctgagcgtccgtcctgggtatccagacgggcgtgttctggaaggtgctggcgtagtaccaggagccgcgttccgcgcgcaggatgagcggggtggattccggaagggtgatgagcgcagggctgttcatgtccgccgcatgtctgccgggcgttttttgggtaacgaccagtaaccgatccgccggaatggattccggggtttccgggtacatgatgtagttcatgacagccgctactgtgaccagtccgctaagggtggccaggatggtcagcagggccccgtgtctgcgggtaacggtcagcagggccaggaaggtgagcatgacggctccggacaggatggagatggggccgagcgtatcatggcggatgtaagtgagccactggttttccgtggtgttggcgggcaggatggcgccctccttgcgttcgatgaattgcaggttgtattccgcttccgtgaagtacggggagagttccagagcacggcggtaattgagagcggccagaccgggtttgttcatgcggtaataggaattgccgatgccgaaacaggcgtaggcgcgttctgccttggaaaggttcatattgccgctttccttgctgaaatagtcaatggctttggcgtactctccctgttcataggcttttacacccaggttgtccgtttccgacgcgtttccggttgctcctgccagggacagggccagtacggcggccatcatgagaacgggaagcttggcgatggcttttttaatagcctggagcatgtgctggcgttccgcgtgcggcagttcttccgaagattccgaaggcttgaatgccctgtcgtcccggagttgaaggatatctttcattttttcattctgcttggaaggtggaatataggattcaataaagttgccggcggcacgcaggaattccgtggagcttgcctggcgcggagtggaagcgagcctgcggaaggctctcatgcgttccctggccgtgaagctttccttccggattttccggatgtagcggatcagagccattcccagcaggatgacggcggggatgtaggccaggaaataccacccccagtgagccggagcggtaagggcgttcatgacggtggcgggcatgagcccgtaaatatccgtcatttcagctaccggaatggtgcctgccgggggaggcgtggcgggagcggcacctccggccgccgttccagtaatggctgaggccttccattccaggggaatgggggctgtggttacggttttgtactgttgcgtgctggggtcaaaaaaagtgagttcaaagggagggatggcatccgtttgggcaaccggacgcatcatttgctgaaattccacggttccctggatggagcgcgtattctggcccgggtccagcttgttgggaggatagagtttccagttggaggcgtctgtgagggccgggcaggcgatactgtggatattgcctgttcctgttaccctgattttaacagtaatgggttcattggcactgagatcccgcgcatccgtggtggaggagatgcggaaattccctacggcattggtgaaggaagagggagctcccggggggagttcccgggctgtgattgtcacttccggaatggccatttccaccagtacttccgaacggatgaagttggcgatgagagggtccgcctccggcagggcggcgcgtgccgtgacagtgccggacgccgttacctccccggcgcgcagcgggaacagggtgctctggaaggtcatgacattccagttgacgcctttgtaaagtacagaaccgcgaggctggccgcggagcagttccaccagcgtgggttcaaagcgccaggtagccaggttggaggtggtgatggcgggcgccgtgtattccagaatgtattccggggcgtaaattttcagttcgcagcggtccggctggtggacatagggtttctggttgtccacatgccacagcatgccgtacgggactgctgtgccgttcaggttcagcgtattccatttgatggcgctgtaagggtagacagtcagcgtctggggaagcgtggtataagtgcggccattgttggcctgcagggtcagggaagggatttccacggtgcccacttcgtccggcgttacttcaatggccatcaggaaggcggattggttgggagaccccggccagcggatgtagttgccctggctgacccagcgcaggctggcgccctttacccggggaagcgggtcctggcgggcgatgcttccgtctgtcaggatgatgaagagacgggtttgttctcccggcacaacggcatcggacagccaggtggtaaccacctgctgagccataagcgtgacagtcatgcagaagaaaagcgaaagaatggcgagcagttttttcatcttgttttgcgggatatgtttaaaggggtggcttcgcggatgcgggcggaacgggttagtaatccttatccggaggaatttccggagaacgctggggaacggggcagccgggttcaatgtccctgcgttccatcaggatggctcttgcttccctgcgttccttttcctccctgctttccttttgtgcggctgccggaacgggcttgttatcttccggctggggctgcggtttttccattccggacgtttctggcagcctgtctttttccggagaggagggaagccgggcgtttttcatttcattttcgtccctcttgccttccttggtttcggcgttatccttgtcttggtccttgtcttggtccttgtcttggtccttgtcttggtccttgtcttggtccttgtcttggtccttgtcttggtccttgtcttggtccttgtcttggtccttgtcttggtccttgtcttggtccttgtcttggtccttgtcttggtccttgtcttggtccttgtcttggtccttgtcttggtccttgttctggtccttgttctggtccttgttctggtccttgttctggtccttgttctggtccttgttctggtccttgttctggtccttgttctggtccttgttctggtccttgttctggtccttgttctggtccttgttctggtccttgttctggtccttgttctggtccttgttctggtccttgttctggtccttgttctggtccttgttctggtccttgttctggtccttgttctggtccttgttctggtccttgttctggtccttgttctggtccttgttctggtccttgttctggtcctgttgttttttcttctcttcttccaatttcttctttaattcttccagctgccggcggtattcgtccagggatttatcataacggagcatttcctccttgttggacgctgctccttcatgggaaccataggcagagagagcatcgtcaaaacgtttgacggcctccttaacatgttttttcgcaacgggtatttttgccagccgggcgtcaatttccttaatttggtcgtcaatggaagagggccgggcttgctgttgttcctcttccggcctggagaaagtcatggttttgcgggcctgggcggcttccaggttgccaaggttgaagtgggaatccgcctggagagctggtttgggagaaaggagcgcctgggagaaagcttccgcagcttctttggggttatccgctttttgttccaggcatcctttggcgaattccaaggcctggcgcatttcttccgctaggtcgggaacagcgagcatttcatcaatggatttgacggcttcttccgtttttcccgtccggatcaaatccgtgacattgtccaaggcgtgcgtgtccgcctgcgcttcctgacccagcagcccggcgcagaataacgccgcagcagtcagagatgtcataccgcggcgtccggaacggcggaaggagcgccagcgtgttcccgccagaagggtgaggagcaggcagatgagggccggaacggcaaagatgatgtagcggtcattcggcacgcggcgcacttcttccttgccttccgtggtatccagccggtccgcgatgtccttgacgaagcggttcagcgctgccccgtcggagagttggacatattggccttccgtttgcctggccaggtattgcaggctttccggattgagcttggagacgacgtgctggccacgacgatcccggtacaggccggagggggattgctcatccggaatagtggtgccgatagtagtaccgatgcccgccgttacgatgataagctggtgctgccgtgcggcttccgcagtcttataggtgatgttgacggtgtcttccccgtcgctgaggatgaccagggcgtttttgacatccgcttccttgtcccgcttgaaggtttgaagggccagccgcacaacgttttccaggttggttcccccttgggagacccagccgaattgaagttgttcaatggtttcctttaatgcgttatggtcatgggtaaggggcatgagcaggacggcgtctccggagaagatgatgatgccgaagttgtcccccggcagggcgtccagcaggtcgtaggcggcggtttttgcccttcccaggcgggtcggggaagcatccttgctgagcatggaacgggagcagtcaatagcaatgaggatgttgcgcgatttggggatttcctttacctccgtgtagccgtccaccgggcgcgcaatggagaggatggcgaagatggacgccagcacggcaaagatgacggggagcacccggtgccaggtggccggagcgtgaaccagttcccgccggtattccggcgaaacgagcacttcccattttctggaacggcggcgccacagccaccaggccgccgctgcgagcaggaccgggagaatgagcgcgtacagaacgttgggataaaggaaagtcatgacgggtgaagatcggtattacggggcgggggccggtttgagcacttgcagggagaggcccagaagcgccagcgcggctcccgttacaaggaagtacatgaagtattcttcaatgtggcggacggtttgcactttggcctcgcttttttccagcttcccgatggaggtgaacgctttattgaaggaggccatattggtggcccggaagtgttctccgcccgtgagctgggctattttccgcagggttggttcgtcaaattcactttgcaccaccataccgttcgccagggttccttcttccgtgcctacggcaatggtataaattttgatacccagcttggccgcgttttccgccgccaccagcggggatatctggccggagttggaggcaccatccgtcaccaggatgatgatttttgatttggtttccttacggtcgtccagccgggtggccgccgccgcaatggcggagccgatggccgtgccgtccgcctggatcatgcgcggatggaaatcccggatgatgctgttgaccagggcgtggtccagcgtgagcggacagaaggattttgttttcccggcaaatcccacgataccgatgcggtcgtccggacggctgtcaacaaattgggtgatgacgtgtttggctgctaccagccggttgatgggcattcggttgagaaccatgtccggcgtttccatggagtaggaaaggtcaaaggcgatcatgatgtcaatgccgttgactgtccggaaggttttatcttccacgtgctgggggcgcgccagggcgatggcgatggcggcagccgccagaacgaagcaaagggcccctattttccctgccagggattgcggagtgcgcgccagggaagcgatgaagcgcacggtggggtaggtgatggagccttccgccccgcgcctgcggcggaggatgatgaggcacaagatgaagggtaaggcataaagccattcaggttgtgcaaattggaagtgttccgtcatggtatgctagcgttggttgaagcgggatgaagattttttgacgacaaggtccgtttcttccttcgtccggtgggcatccgcttctatatcattgatgagttggaccgtagcgttcgccaattcgttgaccatggaatcgttttccggggtgtccggttcatatttgagagaagccatgcggtccagcagatcgcgcgtgggggcctggagttcggaaggcagcgctgtgagcgcgtctgcccggcggttgaattcctgctgggtttcatatagtgccgggtctttggtttctcctaccaggtatttgcggaggatcagggaaaattccacggcggcctgcctgagggagggatgcgtgttccggagcatcgagatgtcccggatagcggtttccgacgggctgagcggcgcggcggggatgcgtccctttctgcggatgagcacgatgacggcgatagcgacggccagaaggatggaggccaaaataatccagatgccccacgcatcccaaaagcccgcttggaagtaggcatccggggattgtgtttccatcagggagggaaacgccggcggttccggaattgccgtgggggggggctgaaaggtggcggggggtggcatggctgatagagaagaggattagcgtgaaaatttacgggatcttctggcaaaaagggcccggaggggaggcatgaagttgtctgtggtctgcaagtccaggaagtcaatgcccaggcggcggaaatcctgcgtccatttctcgcggtgcagatgcacgacgttggcgtgggtttcccggacatcctgacgggaaaggttcaggaacatgcttttgccagtttccggatctttcaggatgacgcgtccggcatccggcagatgcagttccatcgggtctgcgatgcggatggggatgaagtcatgcttgaagttgagctgccccagggcggctttattgttctcaccccagaagtcactgatcatgatgaccatggccgcttttttctgggaaaggacaagttgccgggctacatcggaaatgttctggtcggctccatcgtttttactggctacgatttcgcggacgatgcgcagggtctgcttgactcccttggccggggggatgtaatgggagtggctgttcccgtagatgaggaggccgcatttgtctccgctctgggcagcgctgtaggcgagcactgccgctacttccgccgcatagtccagtttggagacgcgggccgcggaggaggcgtagtgcatggagccgctgacgtccaccgccagaatgacggcctgttcccgttcctcccggaaacggcggacaaaaggggagttcatcctggccgttaccttccagtcaatgaagcgggggtcgtctcccggcatgtattcccggaagtcgtcaaagtccagcccctgtccgcggaagccggactggtattgcccggcgaagttttccgtggccagatgcctggcgcgcagttcaatgcggcgtacgcgcttgagaatgtctgaggctttatccatgaaatgattttccctgtttgggttcaatcaggttccggcaaggcgccccttggggcctgaaggataagggcgggcgcggaagcgtccgcctcctgccgtcacggcacggggactttcgtcaggatgtggtcgatgacgtcgtccgtggaaatgttttccgcttcagcctcataagagagcaggatgcggtggcgcaggatatcgtgggccaggtccttgatgtcctgtggagtgacgaaggaacgatggtgcatgaaggcattggcgcgggccgccagagccaggttgatggtagcgcggggagatgcccccgcgcggatgagaccgcgcaacttcacgtccaccgtttccgggaaacgggtggcgcgcaccagatccacgatgtagccgcgcacggcgtcgtcaatataaatctggtttaccaggtcgcgggaggccgccacctgttccggcgtggtgaccggggaggtttccggcggtttggcggagctggccatgaggtccagcacctggagttcttcttcgcgcgtggggtaggtgaccagcaccttgaagagaaaacggtcaagctgggcttccgggagctggtaggtgccctcctggtcaatcgggttctgcgtggcaagcaccaggaaggggtccggcaggcggtaggtggtttcacccagggttacctggcgttcctgcatggcttccagcagggcggattgcactttggccggggcgcggttgatttcatccgccaaaatgagattggcgaagatcgggccttttttggctgtgaactgcctttcttccggattatagatcattgtgcccagcaaatccgccggaagaagatccggcgtaaactggatgcgggcaaactgtgcatgcagcgtgcccgccatggcttttacggagagcgtcttggcaaggccgggcacgccttccagcaggacgtggcccttgcagaggagactgaggattaatctgtccacgagcgcctgctggccgatgaccaccttgccgacttccgttctgagagcagaaatccacgatgagttcgcggcgataatttcgttgaattctcgggtgtccatgattctgatagcgggtgagacagtatgccgggcacttacgttgaaaaaatcctattatttcccaagggcaaatccggttttcaacaggaggtcttcccggaaatggggagccatcatctgaaagcccacgggaagttccatgccgctttccctgacggttccgcagggaatggacatggcggggaggccggccaggttggcggggatcgtgtagatgtccgccagataggtctggaggtgatccagcgcggaatctccgattttgggagcgggagcgggcgaggtagggcctacgatgatatccgccttggaaaaggcttccgcgaaatctctggcgaccagggagcggactttttgagcgcgggagtagtaagcgtcatagtaaccggagctgagcacataggtgcccaggatgatgcggcgcttgacttccggcccgaatccctcttcacgggtgcgtgagaagagttccaccagtccggcggcgtcttccgccctctttccgtagcgcacgccgtcaaaccgggagaggttggaagacgcttccgcgcaggcgatgatatagtaggcggcgacgacggcatccgcgtggggcaggttgacttccaccagctccgcgcccaggctttccagctgtttgacggtgttttgcacagcctcggaaatgcccggatggttgccggaggtaaagtattcagaagggatgcccactttcagccctttgacgtcacggcccagcgcagcttcaaagtccggcacggggcagtttgcggatgtggagtctttacggtcgtgtccagagatggcctggagcaggatggcggcgtcttccactgtccgggtcatggggccgatctggtccagggaagaggcaaaggctaccagtccgtagcgggaaacgcgcccgtaggtaggcttgaggcccacgataccgcagtgcccggccggttgccggatggagccgcccgtgtcggaaccgagtgcggcaacggcggtagcggatgcgacggcggcggcagagccgctggaggagccgccgggaatgcggtccggggcttccgggttgcgcgtgatgccgtaagcggagttttctccgctggcacccatggcgaattcatccatgttcgtgcggcccagcgggatgccgcccgcctctttcagcagacggatggaggtggcgtcataaggagcgacataaggggaaagaaggcgggaggcgcagcgcgtcggctggcccaggacattaatgttgtccttcacggcgatggggatgccggccagggggctggaaatatccgctccggccgcggcgtggagggctgcttcacggtcaaaggagatgtaggcgttggttgtccggtccgcctcaatggcgtccgccgtcaggttgaccagttcggcaggggagagttccttgcggcgcaggcggtcacgccactgggccagggtgccttgaatttttgacatgagaaggaaagggtaaagacggttgaaaggtgaagggaaaaggaagcgggaggatcaggcggattccaccaccttgggcgtgcggaattgaccctgggtctgctggggggcattggaaagggcttcttcctgggtgaagccggtttcaggaatgtcttcgcgcatcacgtccattgccgggagaggatggttcatgggggcgatgcccgtaacatcgtaggattccagcttggtgatataggccaggactttgtccagatccttggagaagagagctgtttcttcctccgtcaggtcaatgcgtgccagcttggcaatgtaggctacgtctatttggggcgtgctcatggtgtaatgtagaaaagatgcggaaaagaaagggggctgcctactgttgttccagcaggcggacgatccagcagaaggaaacggcgatggcgcagatcagcaggcccagcagcatgaagttttctcgcagttcccgcctcatgttggtggcgcgtccgtcacgggccactacggcacgcagtgcccggttctggttgccctcccgaacgcggtcgggaggcggcatggtattgcggtccaggcgcatgcgggtctgctgggacgggcgtttgagagaggcttccaattcctggatacggctctcaatttcccgtgaggcgcgatccagttctgccagttcggaggaacggcgtttggtttttcttttaatcatgatgcggaagggctgaaaatccagatgaaaaagaggatgatgagagcaatcaggagcaggggaagatggaaggaaagaccctggaggaactgggtcatgaattcacgggagctgatgcgcactttgctggagcggcgcactccggtgagcactttggtatgctgcatgcgcgcgcactgctggacggcatccgcgaattcctcctcgcagcggtcaatgacctgctggccctggctgatgaggttgtccgtattttcaataggccattcatccgggcgcacggtgctgagcattttcaggctgcgcgtcagcgccatgtggatttgttccagttcattgctttcctggcggaggctttccacctcccggccgatgaggtctgcggcgttgaccatgcggtcgcccagctcgttctgctggtccataaacctggctttgcgcatatggcattcttccaggcggcggcgggagttttccacttcctccttttccttccgcaattgttccagcctcagctgggcctgttccatatcggcgtccacctggtcgtctgcctgggaattgtaaccggggtcggcgtccatgcggcggtattgagggtgacttggtctcatatgcggaaaaaataatgcgggccggcgtaagggattacagcgtttccggtcctttttgccggagcggggaatccctgcgcgtgctattatttaactttcacaaaataaatcaagccaagaagaagacagggaaagattttccggatgcgttcccggcagggaatgccgccctgttttttcttccggagccgtgcgttccggatatccggggggcgacaggacgctccgctttcccgcaaaggagggggaggtgcgctttttttatggtcaagggcatggatttgctggtatgtaggaagcatgcagtctgacacggtagaatgtaagccgaccatgtggtttaccggcagggcggttatcatggctctcatgtttctggggttcggagtgtatttttattatgatgcttccaccggataccctcaaaaaaacctggagtttttcatgcacaaggcgttcgtggacgctggagccgtgtttgaccgtgaggtgagcgggaaaggggcgtccgcggaggactgggagcgcattgttctggcgcgcactgtggattttccggagggctacgaaattccttccgacgtgaatcggaacgcggtgccgtggcctgacattttggcggattacagtctgatgtccacccccggcaagggctggagcgctgcgtggcaatcttattccggggaaaagcactatcccatcaagccggtggaccacccgtatgacgcctccaaaatttttgaacagtgggtggccgggtgcatttgcctggcgcttgccatggtggctctgtttttcttggtgagaacgcgcggcaggaaaatgtccctgaacgggaaagaggtgacggccgccggcgtggttttccgcgtggatgacattgcccgtctggatttgcgcagatggaaactgaagggactggccatagcgacgctgaaaccggaatgcggaggagcccgaatcaggctggacggcctgacttacggcggcttccggaaggaggattctccccataacgcggaagatttcatgaaggctcttctgtctctctacagaggagaaatagtggattatgaagaaattcctgatgccggcgggccgcctgcccggcaggaggacgaggaacgtgccgtatgagcgaatcccttccaccggaaaagggcgccaatgaccgtgcgttcggcgtcgcctgctggacgctgggtgggctggcgtttgttctgttgctgatggtgggcgtttctttcagcctgtctgtccgtaccgtggtggtggaaaaagtggtggagaagcctgttcccgttccggcacgggagaagccggagcgtccggccggagtcgttgaggatggggcggctgaggagaccgtgcatatggcggatgttccggcatccccttctgaaaagccccgttccgtggaagaaatgctccgggaagccgatttgtcagatccggctgccgattctgtaccggtggctgcggccgttgcgggagggggggattccgctagcggggcatcccttcctgctgagaatccggacgaggtcatgccccccatgacggaggaagtggcggagcttgtcaaggcggctcgttacgcccagattgaaggtgacctcaaagtagcggtcgtgaagctggagcaggccatgaggctggagccggataatccggtggtgctttattattatggacttacctatgaatggctgaggaatgcggataagtcacgggagttttttctgaaagtatatacccagcgggagaaggcggggaaatattttgcgcgtgcggcgcggcaccttcaggccggcttttccagcccggcggatttgcggggggatatgtccttcggcactattctggaataccgggatccggaatgccccgccggggagcgcgtcaagctgatggttcctattctgatgaaggatggcctgaatgtcaggccggaggatctgcgcgtcattgtccagttttttgacaaagtcaatgggaagaaagtggaaaagacgcacgcgcccgaaccttcttcccggtgcgttacggaacccgcggattgggcggacggtgaggaaatcatggaaataacctactacatgcctcccctgacggaagaagagacgattgcttatgggagcctgaaatattacggatataccgctaaattgtattacaagggggaaccgatggattgccatgcttcccctcccgtgttatttttactggaacagatgaaccagagttccccttccggactgcccgagatttatgacggcggtttgcttccccctgtagaggcggctccggtttctgagtcttatgaatcccttttgcctccctgatgcctgatttgtccaatgtttgatcttccccacaactttggcgattacacgctggtggcattcattggccgcacgcgcggaggaattctttatcaggccatccagcagggcatggaccgttccgtgtttctggagttgctggatccggacaatccggagggggtgggcgtggaggattttctgatgaaggcccgcacgcgcgccgccattaatgctccggtgctgggcaccgtctatgaagcgtcccaggcccagggatactggttcgtcaccagcgaacagctgggaggctcatccctccagtccatgctggaccgcgggcagaccctgtccatgaaggatttgctgaaggtgattgaaacggtcggcaacgtgtgcggcaggtatgagcgtctgcggaccgctttcaatatcatggagccgcgtcacattttcctggatgacaagtctgccgtgcggctgatgaatacggccgtgcccggtgactttcacgaagaaacatcccgcgaccagatgaagcgcctgggcatcgacctgcctcctctggtgactccggatgtgcccggaaccacgcggatgcgcaccctgctggaatggatgagggaagggcagaacggaaagccgatgcaatgggaccaggttatggagctggttgctgcggtccgcgaacagctggggctttcccctcgggttaccacccaccgctataccgtccccgtggaatcccgcggaaaagccggaaaaaggctgctttgggccggaacgggcctgctgggcgcggggatagccgtggctgccgttctccttttattccaccgggagaaggaaaccgtatcccgtccccatgttccggctcctaaacattatccggatttttccgccagcgatcatacggaagtccgcgtaactcttcccggaggaggggaactgattgtgggagcccatgaaattaccctggaatcctaccgcctgtttttggaccagtgggcacgcctcactcctgagctgagggaggaatattcccacccggaccagccggacaagaggactgcctcccatattccccaggactgggaggctatgtggaaggcggcttccacgccgggaggcaaatggaaaggcaggagaataacaccccgctctcccgtcgtcaacgtcactttctgggatgcctgggcgtatgcgagctggaagcccgtggcccccggagaaccgcgctaccgcctgcccgagcgcggggagtggatggctctggggaatatgctggaaacgggtgagaagggggacaggacgctggtgattgacagatacagcaatgatcatgatttaaagaccggcgtgtgcggcatggcttccggcgtgatggaatggacttcttccatggaaaaggatcctgcgcgcgtgaaggagcctccggggccggtggcctgcggcggagactggaggaagcccggcatctccaaccgggtggaatacctgcgctcccgcggtgaaagccgggacaacctgggattcagaatcgtgcggaatgtccgctgacccgtttaacgacaatacttaacatatcaataccatgaaacatatccttgcaatgctgctggcccttctgggggcgtccggggccctggcccagatttacgtgaaagtagtcccggaaaagaagacgttcctcagcggggaagccatgtacatgaggctgaccattaccaacaattccggcgtgccggtggaactgaagagccgggaatattcctcctggctggatatccatgtggagcattccactgcgggggcggaactcccccagtccaaatttgccctgtttccgcctctcaaggttcctgccggcatgagcgtttcccgcaagattgacctgcgccatttctatgacttgtcccgtgagggcaactaccatgtgcaggccgttgtaaaaatgcccaaccagaaggacatgtttgcttcccagaaatccctgtttgccgtccggacgggaacacccatgtggtcccagaccgtggccattccggccagtgccaagaggtgcactttttccatttgcactattgccgtgcggggaatccagaaattgtatgtgcagacgaaggatccggatacgggagtggcctacaatgccgtgtgcatcggtgactggctggggaccacgcgtccgcagtgcatggtggacggcaaggcgaatgtccatgtcttcttccccactacccccatgctgagcgcgtattcccgcatcaactaccggggaactatggaaaagctgcagtactataaaaaggtggtgggagccccctccatggtctttcttccggacggaagcgtacgtgtgacgggagccgtccattatgatcctaccgtgaagcccaagacggtgccggatgccgctgatgttcccggcatgtgaatccgtcctgtttcgccggatgccacgcaggggaaaaggaaaggcaaacgtactgcttcttccgtaccgggaaaataagatgttccggtattttcctgagctattttcccggctggggagtgtttttcaggatgttttgcacgcttttctgcacaacgctgatgggcagggcgtaattttccgcccggttcactctggcgatgttcatgccgatgagttcccccttgagattgagcagcgggccacccatcagcgtgtaccgggaaggggtgtcatgctggaggaccatagggaaatcatccctgcgtttgctgaacccgccgctgatcaggtcattggaatcctcaggagcgtttcctcccagggcctggcgtctggaacccagcgtgatggtgtaggataaccttttatccttgcgtttgactttcagtgtcactctttctccaacttttttcctggacagaatgggggaaacggcatccagagcagtaacgggcgtgccgtccaccgccagaatctcatctccggcctgggctccggcctgggcggcggggccgtccttggtaacttcctgaatggtacagggggtgccgaaaacgacgcccaggtaggcggtgtctccgttcgggatggggcgctgctccgcactaagggttcccagctggggccgtctggacgtacgggtagtggagccgttgctgactaccagggttcccatggcggcatcattgctgacagggccgggagcgtgcagcccggcggcttccactttcactactgcgatgtctgtggacgggtccgagccaatttccctgaactgcccatatttggaagaacctacccggatggtcagatccctgtaagaatggagttccgaggctttggtggcgatgtagccgtccgggctcagcacaatgccgtaaatcacaacatcgtgaccggaaaagaaaactgcgctcaagttctgaagacgttcgcggatgggctcgatagttttcagaacggctttcccgttgattctctgttcaaaatccaggcttccgttatttccttccgccagagcggggtggaacagggcgaaaaccaggggagacaggcagacgcagaaaggaaatttcatgatggctgagtggagaatggctggctgtcctgttccggtgacggcgtcagggaggtctttccttccgctgtctcctccgtcagagcgtcgaaatctttcatgggcacgtgcagattgtcttccagaccggaaccgactctgctgtgaatgccaatcagctttccatccaggttgaaaagagggccgccggaatccccgcgaatcaacttgcagtccgtctgaatgacgccgttcttgagggaaaccaccctccccaggcgcaccatcgggccgcgtttccggtccagccccccgccgtgccccagcgcgaacacccagtcccccacacgaggcattttttccgctttttccacgcagggcagttttttgttcaattgggatgtgattttggccatgcctgcgtccgaattgctgttttgcgccgtggtttttcccggaaggcgcgttccatccggcaggatgattttgagcgtggttcctttcttgtccacaacgtgggccgctgaaaagaccaggcctttttccgaaaccaggatgccggagccgctgccgttgtttaattcaatgcagaccagggcgggaagcacccggggaagcatttgctgaagctggcgttcaatccgctgcaaatcttctacggattgcggggtggaagccagaaggccggctccatcagcggactgagccgacgctggcggggccagcagcgctgtgccgcagagaatagcggaaaaacagggattccggagagccggggtcatgattgccggtgattattgcccagagacggaagtttccgtcttctgctgctggtcctcctgtccgccgcccaccagggaatcatggtaatacacgccgataaacaggcctgccagtgtaataagggtgatgaggagctctttcatgccgtcacagcatagaatgtgtattcgcgtctgacgagagaatttcattgataagccgcattttgatgcagttcggcagaacggggatgaatgcggatgagaaaatagccaaaataaaggttgctttttcccgtgataggcgtataaatccctcagcggacgtttccagttcgctgactcatttcaagcggatgtagctcaggggtagagcgcaaccttgccaaggttgatgtcgtgggttcgaatcccatcatccgctccatttttaagagtcccggccggtttgatgcgggaataatgagtttgcctgaacagtgatatttccgtttaattatttgaaggtgcggaaggaggatatggcggtcgtttatttctgcagaggtgaaacaagagccggatatcttgtttgcagcggggccttatgcgctgccccgcctttgttgatctcctccggaaggagaggaattattgcggaagtccgctttcctgaatgacgggagtttcccttggaaggacttttctttttaaaaaaagcgctgtcaaatatttacggaccggttcatcatagagtttcaggcagagccaggccagcagaatgcttccaatgacgacggccagggctccaggaagtgagtccaggaaagaaagcttttcgtttttcacccacgcatagtacaagtagatgaacgggtaatgcaccatgtacagggggtaggagatgttgcccaggaaacggcatattttatccgtatagggatttgtaattttgccggaagcgccaaagaggaggatgagcgggaaaaataccgcgaagcacgctgtttcatagaggctgttcatccagaaagcattttgtcctcccagccggggaacggccagcagaatggcaagggacagactgcataaccagaaagaatttttgacgttgaacggcttgaacagccggaacaggagcagcccggctgaaaaggagtacaacaggcgcagggagccgcccgtccattccgtgccggtcatggagaatccggagcatatgtctccgttaggcccccagaagctgaaggaggcaaggccgcacccggccgagacaaccagtattgccagggagcgtgtagagagtttccggatgaagagggcataaagaaggttgccgatgtattcaaagaacagggaccagctcgggccgttgagcgggtacatttctcccagaccccggatttccatgccgggaggagacggaatgagcagaatattgacgaaggtagcggcgaacagggagatgaccgctacctgcgatacatcccatacggggcagccctggaaatagaagataagcgcgccgatgagcgcccctatcgctaccatgggctgcaggcgtataaggcggcgtttgatgaattccctggtcgtcatcgttttccagcggttgtcataggcgtagccgatgacaaagccggaaagcatgaagaaaaaatcgacggccaggtagccgtggttgatgatttggtccacatggctggtggcgtaggcttcaaagatgtggaaccatacgacgacaatggcggctacgccgcgcaaaccgtcaagaatgtggtagtggtgtttttcactgcctgggggaatgggagaatgctgcgttttcaacatgagagaagctgttgttcgatgctgtttttgttttaatgtgaaaaaacggctgctcattttccgcctttccggtagatgcaggttctccggaggcgcagttgttgagctgcctaagcaaatacccttcttcccggcagattctttcaacaggcgttgcctgtcttatccgtcggcagggcgatgagcggaacgaacggcggttttccggagggaagaatcacttatggctcggaaggtgcaggcaaccgggaaacccgtcaggatggaaccgtttttgtaagtctgccgggaagaacagggtgttgcttgctgcccgtccgatttccggaaacaggagtttcctgcccgcttttctgcgctgaggcgttttttccggaatgggaaaagggcctggcaggggcgaatgctcagcctttgcggtagtttacaagggtttccatatatattccggagatactgccgccgtccatgggggttatgtccttgaatgcggggttgatgggctgcagcacgtattccgtttttcctgtttccgcgtttttcctgcgaatcagttttttcagcgtaacgccgcgtccgtcgttgtattccacgatggttcccggtttgggaatgggcggggcggtatggtgccgcataattaccagggagccgtccgggatgaggggttccatggatttcccttctacgcggaccacgtattcgtttttacccaggggcctttccatgtaaatggtagacgggacggtgtcgctttccgcaagagagcctgcggcgatgttgccgattatttgcgtactgtattcacgcctggcgtgtccagcatgggacggaaattgtctgaccaggggaaccaggggggagtgcattggccgcagctggcgttcctccgccgcttcgtctgctaaatccgtcagccactggcggagggggacgcctttttcagaggcggcccgttcatatttcctcatgcgctcttccgtgatttccagcacgaggcgattggtctggacaggttcgtcttccggttgaaccgttttgtattgagacatcagggattggattttcaacatggcgctggcggggaaggggccggagggggagagccagttattcactgtacctttttccgtaccgcattccatggcaagccagtcacggtttttcccaatggccttcaaccagtgtttcacatccccttttgtcggtgtcatggcttgatgatacacgattttcgtgaattgtcgatagaaagaaataaattgaattcgttaaaatgtgttgacgtgttaacgaaaatcgttaaaaaggtgctatgaagtacatgcctttagacctttccgtaatgcagccggagccgtttccgcatcccgtgatgatgaggtccgacctgtatcccagaagacagccctcccgggaagaaaagtggggcatttgccccggttccgtctgcggcgcgctgcgggcgctggttcgtcgatgcagggaagaggcggagcggcggaagttggcaatgaacattctttccgtcgccggagcctgcgttttcggactgatggccgtcggcgtgttctggctggctgttgagatggataattccgctttgcaggcttccaagtcttcctgttccataaaaccgtaagccggcccttgtccaaaggggagggcggaacgcttttttcctgcggagcttgctttcggaaatgaacggccgcgtttgatgcctcccggtttgttttttccggttgaaacgcctgcggacgcatgaaaggttccggcaggaatgggcgccggatttccagaggggcttttttatccgcagagcaatttgaacgggagagacggggaagggctggagcttggatgattgcattatttgccggctgcatcacccgggttccggaaatgccgtccgccaatgccgttcctgtgcgggaatagcggttggtcttgcaggcgggcagtatggcgcccgtttgcgaagaggatgaagctgtggttccggatttctgtccggagggaaccgcatgagatggagcagggatgcttttcctccacgtggccgtttcccgtttatctggcgcggtttgatttcattctggcgtggccgccgggaccggttgttgaaggagtttcctgaggcgcaagcgggcacaggcctgtatggaaatcccctgtggtgtctgtcgtgccgggatgcgaggcggggatgatgcgacccgggtccggggcgcccatcattccgggcgttatggcgctggtcgggagactggcggcggaagatgccgccaggaacggcggccttccgcttctggattcattccgggtaaaagatgcgccttttgcggagaaagtgaaaaatgaagaggctttttccggttttgcatgttgagaaataattttatgacagttgatatgtattcattataaatgaattaaaaataatgaagcagaaagtgctaaaaattttttgcattatagttactataaggaatagcctgaatgaagaaagaagaaggcatggtacgcggccggcgtcctttcccttctttttccggaatccggccatcgccgtttaaaaggcacaccatgaaaaacaacagactttttatcaaatcatcgccatgaccaagagaatgattaaaaatgcttcctacgaaggggaacgtcccctgttcgcttcccgccatcttaggctggaagacgtcattatttatccgggggaatccgccctgaaggaatgttccgacattgaagctgtgcggtgcgagttccgggggaagtaccctttctggcacaatgacggactgctggtggaacattgcctgttcagggaaggcgcccgggccgccatctggtattcccggaatctgcacatgaaggatacccgcgtggaagcgcccaagatgttccgtgacatggacgggatggttctggagaacgtcgttctgacggatgctctggaatgctgctggcactgccgtaatgcgaagcttcgcggcgtgcaggcggagcatggggattacctgttcatgcacggggagaatatagatgttgacggcttccgcctgaacggaaattactctttccaatattgcaggaatgtggtgatacggaatgcggaaatccattccaaggacgctttctggaatacggaggacgtgacggtgtacgattccgtggtggacggggaatacctgggctggcattccaggaaccttcgtctggtgaattgccgcatttccggcacgcaggcgttgtgctacgcggaaaacctggttctggagaattgcacgctcggagaggatgcggatctctgctttgagtattcctccgtgcatgcggaaatcaaggggcgtgtgcacagcgtcaaaaatccgcgcagcggccgcattgttgcggaagagtacggggatattattctggacgagcattgcaaggctcctgccaattgctccattgaaacgggaaaagcccaatccggagaagccgcatgaagtacgattttgatactgttgttccgcgccgcggcacgaattcctacaagtgggattccatgccccgggaggatattctgcccatgtgggtggcagacatggatttccgtacggctccggcggtgacggacgccatccggaagagggccgggcacggcattttcggttatacacgggttccggattcctattatgaggcggttacaaactggtttgaacgccgccacggctggaagattaatccggaatgggtgatttataccacgggggtggttcccgcgctgtctgccgtcatacgggccctgacggtccctggggacaaggttctggtgcagacgcctgtatataattgctttttttcctccatccgcaataacggctgcgtggcggaaacctgccctctgaaatatgagaacggcagatatgcgctggatgcggaggagctggaacggaaagcctccgatcccgccgtcaagctgatgctcctgtgcaatccccataatccagccgggcgcgtctggacgagggaagaattggaggagatggccgccatttgccggagaaacggcgttttcgtagtggctgacgagattcattgcgaactgacgtatccgggccatccctatacgccgttcgcctccctctccgaggacgccctgcaccattccgtcacctgtatttcccccagcaaggcgtttaatctggcgggcattcagatagccaatatcgtcgcggcggatgaagaagtccggaagaggattgacaaggccatcaacatcaatgaggtgtgtgacgtcaattcttttgctgtagatgccctggaagcggcttataacggaggggaggactggttggaggaactgaagctctacctttacgggaattacgagattgtctgggatatgctggcagaacgtctgccgcagctccgtgtggtgccgctggaggggacgtacctggtctggatagattgttccgctctggggcttccctccgcagagattgtccgcctgctggaagaggagggtcgggtgctcgtcaacggcggggaaatgtacggggaaacggcggggtgcttcattcgcctgaacgtcgcctgtcccaggaagctgctgcttgaggggctggaaagaatcatccgcacgctgtgcggcctcatttccggaacacggacgtgcccgtcgggccctgcaggctcttaacagggagaacggttattaatcatcaacaatcaagttgccatggaaaataagatgacgagaagaacatggctccagtcttctaccgcagccctggcatgcctggctttgccggagtatgccctgggcgcggttgcggagaagggtggagcttccagggtctggatgacgaaagaaatttctccggaggctctcgtgaggatttacgaggctctgggacgtccggccgggggaaaggtagctgtcaagatcagcaccggggaaccgggaggccgcaattttctgagtccggccttaattaaagacctggtgcgccgggtgaacggcaccatcgtggaatgcaatacggcttacggaggcaaacgctcccggacggaggaccatttgcagactgcgaaggatcacggtttttccgatattgcgcgggtggatatcatggatgcggaaggggagttcactatcccggtgagggacaggaagcacctggaatacgatatcgtgggggatcatttaaagaattatgatttcatggtcaatctggcccatttcaaagggcatgccatgggcggcttcggcggcgtgatcaagaaccagtccatcggtgttgcctcggcatccgggaaggcgtacatccattccgccggaaagacgcgggatgtttcctccgtgtggaacaatctggccagtcaggatgatttcctggagtccatggcggcttccgcgcaggcggtggcggattacttcggggacagaattttgtacatcaatgtgatgaataatctgtccattgactgtgattgcgattcccacccccatgcgccggaaatgaaggacatcggtattctggcctcccttgatccggttgctcttgaccaggcctgcctggatctcgtttacgccgtcaggccgtccgaagggaatgacaacaggcccctggtggagcgtattgaaagccgccatgggcggcatacggtagagtatgccgagaagataggtcttggcagcaggaagtatgaactgaaagagctgaaaccgcagcaggccgtttagtcggtcatttcctttttagtatcaaaaacaatagaaaaaactgtgatggaaaaagtgatgttgaacaatggcgttacgatgcctgtcctgggatttggcgtttttcagattccggacgctaaggagtgcgaacgctgcgtgctggatgcgattgaggtcggctaccgttctattgataccgcgcagatttacggcaatgaggaagccgtaggccgcgcagcggagaagagcggggttccgcgggaagagttgttccttaccacgaaggtgtggatttccaacggcgggtatgagaaggcgaaggcgtccattgacgaatccctgcgcaggctgcgcacggattatctggatctgctgctcatccaccagcctttcaacgattactacggcacttaccgggccatggaagaagcgaaccgggccggaaaggtacgcgccattggcgtgagcaatttttatccggaccgttttgtggacctggcggagttctgcgagatcagacccgccgtcaaccaggtggaaacgcatgtgttccaccagcaggaaaaagtccgggaggtgatggaaaagtacggtaccagaatggaatcctgggggccttttgcggaaggtcgcaatgggtttttctccaaccccgtgttgaagggcattggagagaaatacggcaagaccccggcgcaaacagccctgaggttcctgattcagcgtggaattatcgccattccgaagacgacccaccgggaaaggatggaggagaatttcaacgtctttgattttgccctttcccaggaggatatgggcgctattgccaggctggaccgcggagagagccttttcttgtgccaccgggatccggaatcggtcctgtacctgatcaattacgggaagcagtaattcgcatgaagttccagaaagatgacacgatactcatttaaaatattttgcgtggctttttccgcctgcttttgctgtgcggggagcctgttggcagaagataataacccccatacggacaagatgatgaacgagaagctgaatttaacgcaggaatgggacaaagtgtttcctaaaagcgacaaggtaacccaccgcaaggtaagtttccgcaaccgttatggcattatgctggctgcggatttgtatatgccccggaatgttaacgggaaattgccggctattgccgtttccggccctttcggggctgtaaaggaacaatctgcgggcctttatgcccagacgatggccgaacgaggttttctgacgatcgcgtttgatccctcgtatacgggagaaagcggaggatttccccgctatgtcgcgtctccggatatcaatacggaggatttctgcgccgccgtcgattacctttccacccgagatgacgtggattcggaacgtattggaatcattggcatttgcggctggggcggcatggcggtcaatgcggcggctatcgacacccgcatcaaggcaacggtaacctccacgatgtacgatatgagccgcgtgaacgcgaacggctatttcgacgcgatggatgccgacgcccgttatgagcttcgcaaacaactgaatgcccagcggacggctgatgcgaagagcggttcttatgccctcgcggggggcgtgcctgatcctctgcctgcggatgcccccggatttgtgaaggattattacgattattataagacgccccgtggctatcacaggcgttcgctcaattcaaatggcggatggaatgtcacttcggcgctttccttcatcaatatgcccctgctggcgtacagcggtgaaatccgcagcgccgtgctcatgattcacggggaaaaagcccattcgcgctatttcagcgaagacgccttcaggaagttgaagggggacaacaaggagctgatgattattcccggtgcaagccatgtggatctttatgacaatcaagccggtgtcattcctttcgacagaatcggacagttctttctggagcatctgaaataaggaggccccgcatctgaatttgggaaagaaagacggaacgtaatgaaacgcaaggattttttgaagataacatccggtttggccttatccctggtttcccggggatgggccggggtgggttcttctttgctgtctgacggtccggggtcttcttccggggtgccgaagaagagttttcttggggaatcccggcgccttggaggcctggaagtttcctctatcgggctgggatgcctgccgatggtgggttattacggcggcaagtatgataaacaggagatgattgccctgatacgccgggcttttgacaaaggggttactttttttgatacggcggaagtgtacgggccttataccagtgaggaatgggtgggggaggctctcgcccctgtccgcaaccaggtcaggataggaaccaaattcggttttggcgtggaggaaggccgtccttcttccctgaacagcaggcccgaccatatccggcgtgcggtagaaggttccctcaggcgtttgcgtaccgaccacattgacctgctttaccagcaccgggtggacccggatgttccgatggaggaggtggcaggtacggtgaaggaactgatgcaggagggaaaagtgctgcatttcggcctgtccgaagccggcgcccgttccatcaggagggcttatgccgagtgtccggtgagtgccgtccagagcgaatacgctatctggtggagggaaccggagacgaagatttttcccacgttggaagagttgggcatcggttttgttccgtattgtccgctggggcgcgcctttctggcaggagccgtccgggaggacagccgttttcaaaagcgggaccgccgcgccactttgccccggtttactccggaagccctcagattcaatatgccgctggctgttcttgtccgggaatgggcggaacgcaggggcatgactccggcccagttcgccctgtcctggatgctttcccggaaaccgtggattgcgcctgttcccggaacaaccaatccagcccatctggatgattttctgggaggggcttccgtccgcctgtccgaaccggaactcaaggaattcgaccttgcctgttccagaattcccctgatggggcaccgggcggatccgtttacggagagccagattgacaagtagttttgccggcgcgtttccttccgctccggaaaaatgccgcgggactgtttgcggcggaaggatgttaagctatttttaagaaagagacatatgattctgattttcggagcattgctggcggtttacgttttttgccgcgctattttgccgctgaagctgaaatggggctggaagcttctgcttgccgccctgctggcggtggcggcattcaaattccacttgctgcatttgtttggaggccccatgtttttctccccggttttgccggaaaacgttctgctggcggccgcgtggctgttctccgttcttttcctgttctttttcctgctgctggcggcggatgtggtgcgggctctgtatctgctggttttgttctgcttgcggaggaacaggacggaaaggttccgcatcattggcaaccgggtgaatgttgctttgctggttttttccgccgtgctggcaactgtgggcatgattggaggcaccagagtgccccaggtgaaggaggaaacggttgccgtgaaccgcctgccggaggaggcggacggattgacggtcgccgtgctggcggatctgcatgtggacggcattacaagggaggagcgcattcggaagattgtggagcgcacgaacgccctgaatccggacatcgtcgtgattgccggagatttcgtggacgggacggtgcccgtgcatggcggcgatttgaggccgcttgcggatttgaaggccagatacggggtgttcggcgtgccgggcaatcatgagtattactccggttatgaggagtggatggagttcctgcccaccctgggcattcgtatgcttcttaatgaacacgcgccggcgggaggggaggccgtggtattggccggtgtgacggatcctgtggccggcatcatggggaaggaggagccggatataagcaaggcgttgaaggatgccccggaaaagggagtgcgcatccttgtctcccaccagccgcggctggcccgggaagcggctgcgcacggcgtggatcttcaagtgtccggccatacgcacggaggcatgattgccggggtggaccggctggtggcgtgttttaacgagggattcgtctccgggctgtacacggtgggtaatatgaagctgtacgtttccaatggggcggggatttggaacggctttcccatccgcatcggcgttccatcggaaattgttctgattcggcttcggaaagaataacatatattgataaagcagtttaggaagtgatgcgggcaggattgccggaattgttgaaaaaatattgacttatagttactctaatgtttagacagaaataaggaacaaggtcaggcaagggaaatgccggatgaaaccgtttttgccggacgccttttgcctctccttttaaccggataaaaataaatgaaaacaatatcaatgatatgcacgctggccgcggccctgatgacaggagccggatgtttgggacaggaacaacccaaggtttccgcggaaccttccagggtcctcattgcctattattcatggggaggcaatacgaagtacgccgctgcgcaaattcagagggcgacgggaggaacgctgtttgaaatcaagccggtcaagccttatccctccgaataccgggaatgcaccgtgcaggccaggaaggagattcaggaaggggttcggccggaactggccgccaaagtggaggatatgggcaagtatgatgtgattttcatcggcagccccaactggtggagcaccattgcgcctccggtcgcgtctttcctggcaagttacgacctttccggcaagacggtgattccatttgtgacgcatgggggcggcggcatggcgcgctgtgcggacgaggttcggaagctgtgtcccaagtccaccgttctcaagggaggcgcttttgccggggaaggaatccggacgacgagggccgcgcttgtcaagtgggtcaatgagacgatttccatcaataaataatgattttatgaaacgaaccatcgcgggaatggctttttcccttgcctggctgatgaacctttcagaagcccaaaccataaatcacgataaagtggaaatggagaatggcgaaaatacgggcatgtgcgacaagttaccgatgaagcctgatggtatcgtccgtctctcaaaaatagaagtgcattctgaatatttggaggaatatgtgaaatgcgccatcgaagtgggggaaatctccctgcgcatggaaccgggcgtgttgaccatgtacgctgttgctgaaaaggacaatgcttgcagaattacgattcttgaaacttacgccagccaaaaggcatataagtcgcacatcgcatcggctcattttcagaaatacaagcaggaaacgctgcatatggttaaggcattggttttatccgaccagacgccgctgaatcctctaaacagtattactaatattattaaataatacaataatgaataagattattttatttctttcaattagttttttcataacaaatgctatggcgcaggaaaagatagtacagacggcgggacgcactcagttaggagagtttgctcccaaatttgcggaacttaacgatgatgtccttttcggtgaagtatggagccggactgacaagctcggtctgcgtgatcgcagtttggtaaccatcacctccctcattagtcagggcatcaccgacaattcgctcgttttccatcttcagtcggcaaagaagaatggagtttcccgtaccgagattgcagaaatcatcacccacattggtttttatgccggttggccgaaagcatgggcggcatttaatctggccaaagacgtatgggcggaagatgcggctggcgaagacgccaaagccgctttccaacgcgagatgattttccctttaggcgaaccgaatacggcatatgccaagtatttcacaggcaacagctatcttgcacccgtttcacgcgaacaggtgaatatctccaatgtaacttttgaaccccgttgccgcaataactggcatattcacaaagcgacgaaaggcggcgggcagatgcttatcggtgtggccggacgcggctggtatcaggaagaaggaaagtctgctgtggaaattcttcctggaacagtcatccatattcccgccaacgtgaagcactggcacggggctgcctccgacagctggttctcccacttggctattgagattcccggtgagaatgcatccaatgaatggcttgagccggtaacggatgaagagtatgccaaggccgtgaaataatgtggatacttccatgtgaaacaattatagtgcaatctgttgtgttggtaatgtaactgtttgatacaaatgtaattaagaatttgttagatctgtcgctttctccgtaatatggcatacagtcattttttgaaaatgcgcggtatctttgccacatattgaaaacaagttaatattaaaagaaagaaatatgaaatatgttgaacctgtatgagccttttatttcacatcggcagtcattgtggggacaataatagaaaacagtcttatgcggtttaaaaaatataataaaagaatacgaaatgaaaaatcagtctaaaattgcattagggacatggtcatggggcgcaggatttgccggaggcgaccaggtattcggcaataatctcggagtagacgagctgagacccgtattcgacgaggcgatggcaaacggggtgaatttgtgggattctgccgtggtgtatggtatgggtacttcagaaacgttgctctcgacatttacaaagaatagaaagcgggaggatatatttatctcgaccaagttcactccgcagattgcaggcgagtcggaagatccggtagccgatatgctggcagggagcctcgaacgtttcgccaccggttacgtcgatatttattggatacataatccggccgacgtggaaagatggacgccttatcttattccactggtaaaaagcggtaaggtaaaaagagtcggtgtttccaaccataacctcgcgcagatcaaacgtgtgaaggaaattctctcgcaagaagggatacatctctctgccgttcagaaccattacagcctgctctacctctcgtcagaaaaggcaggcattctggattattgcagggagaacggcatcgacttttgggcttacatggtgctggaacagggggcgttgagcggaaaatacgataccgcgcacccgttgccagccgatagccagcgtgggaaaacctacaatccgctgctgccgcaaatagaaaaactcgttgccgtgatgcgcaccgtgggcgataagtacgatattacgccggcgcaggtggctctggcatgggcgataacgaagggcacgacgccgattattggtgtgacgaaaccctcacaagtgcaggatgctgtccgtgccatgcaggtcgtgctgactgttgacgaagtgaagatgttggaggatgcggccgaaagcacgggggtagatacgagaggttcatgggaaaatccgatgatatgatgaggctggttataatcatcggagttgtcctgtctgtatggtttgcggattgggcggcggcacagcagattgtggatgtgcattgccataacattatgtctggctatatggaagtgttgaaaaaacatgatgccgctttggaagagacttttccgttgccggaatggaatgtggatgcccatcttgcctttatggaaaaagccggaatcggttgttctgtattgtcgatgcccgcaccgcaaccctacttcggtgatactggggagtgccgtcgcataatccgggaatataacgagtattgcgccgctctgaaaaagaaatatccgggcaagttcaaattttgcgctgcactgccattgcctgacgtgaacgctgccatagatgaggctgtttatgctctcgatacgctcggtgcagacggcatcaagctggccacgaacagtcggggacagtatatcggggatgaagccctcgacccgttgatggaggtattgcacaagcggaatgccgtcgtcatcattcatccgcacaagcctaatccggttaatgataccattatttctaccgccccgcttgcagtctatgaatatccggccgaaacgacacgtgccgtcgtcaatatgatttcccgcaacgtgttggtgcgctatccgaatctcaaggtggtcgttccccattgcggctcgttcctgcctatggcgattccacgcatgaaggctatacacccggctatgcaggcaaagggatttatgggttcaattgactgggatggcaatctatcccatttgtactatgatcttgccgggggagcgagtcctgaaatcgtgaagatgatgctgacggtcgctccgccagagcatatactttatggttcggattatccttatatgtctgacggtgtgttgtttggaaatctgcaacggatgcgtgaacagtttgctgcggataaggaactgtcaccctatttggaacagtttttttcggaaaatgcccgtaatttatttaacaaataatatttgaaaacggagagcatacttttcggtaggataagataacctgtgaagagattgctacagccgttacttttttgataagcgacgaagccatatttgtaaccggagctgactgtgaaaacgaacggcattataggagcagagaacaaataacagtaaaaagaaagaatatgaaaaatatattgattatcagcggccatacaaaccttgccgcatctgtagccaataagacaatccttgaaaccttgaacgagcggctgccggaagctgaactcgtaaagcttgacgaactttatcccgatttcaagatcgacgtggaagccgaacaacagaaattgctgtgggcagacatcattgtattgcaattccctctcttttggtactccgcaccctccatattggaacgctggatggaagaaacttttcgtcacggcttttcacacggcagtaccggagacaagctcaagggcaagaaactcattctctctttcacaacgggagcgcccgaaacgctgtatagccgtgaaggggccatgggctacgcgattgatgaatttctgccatgctacaaggctgtctgccgactgactcaaatggaatactgcggcagtgtttatacctgcggcataagttacggcaatcgtacgacaccggaacttatcgagcagcaaaagggagcatcggtggaacacgctgaacgtcttatccggttacttgaagcgctctgatgtttgaataatttcgacgctatggccttcaattgccctctatccgatgactgcatgaatttcatgtatgcggaggcggcaggaagcaaataagaacgcagagcggccgggattcctcattggaaatcccggccgacgtctgttgaggatttaagggagggtttattcctcaggcgcgatgttcggctcgctggcgctgatgtagttcagcggattgcagctgtccggcctgcggttgtctaaaagatcctgataaaattttttcttgtatttcaacacttccatttgttttttcaggattcggagctgttcccggagacttttctcttgcttgaagatcagttcggcgcgctccggaatggtggaatccccttcctggcacaggtcgatgtagtgcttgacgccttcaatcgggaggcccgtcatccggaggcagtggaccaggcggagccaccccagggtgtagtcggaaaacatacgggcattccctccgctgcggtccacgtccgggattaatccggcgttttcgtaataccggatggtgtaggctgacatttccatcatttccgcaacctgcttgacagtgtatctgggggtgcggtcataagaagggcggtaggtgccggatggatttttctgtttaatcatcgtgtgactgatagcttacagttactccaatatacgaggcgttgccggatgacaagttttttactgtgcttcacgggaataacgtatttaaaggccaaggaaaacggcggtaactccattccgtggaggaaggatcgggctgtgcgtcggaatatcgggggaaggggggcaaatgagttgactggcttttcctccccgttacaatgaagcccgctccggggacggagcctgtaatgatgattattgcctccctttccgattccgcccgttacgaaatgttgaatcccctgttcaggagagctttcgattttatcagggagattgctccggcaaccctggaaaccggccgccatgtcctggaggaagacgccctgaccgtgatggtgaatgaaccggtgatgaagaagcgggagaacgcccgcatggaagtgcatgaccggtttattgacattcacgtgcccctttcccgggaagagggattcatgtggaaagagcgcgcggcgctggaaaagccttccgaaccgttcaacagggaaaaggacgcgcagcattatgatgatgctccggacacctcttttgtcgtgaaaccggggcagttcgccatttttttcccggaggatgcgcatgccggctgcattggggaaggaaagattctgaaactggtgattaaagtcagaacggcctgaacctcattccggaaaaacagtccggaatggagaacaggccgtttcttcaatttgcgggcgggagttgcgttattttccgtcttccttccgggcgtcctgtaaagcgttttccggaatccatacggccacattgccgccgtggacaagaaaccggccgttgccttccccgtcaatggagacggtttcctccacgttgccggtggcttccttccaagtttcccctgcgtgctgcttgcccacgttcatgactttgtctccatcctctccattggaaatgagcacagccacgccggaatgcgggtgctcttcatctcccacacgggtgaagccgatggtgttcgggtggtcaaagtagtaattttgttccccgaaagcatggtttttacggatttccagcagattgtcgatgatggcgcggtgcatgggcgggttgccgctcacaccgtaatagtccccgtagaagatgcagggataaccttccttcatgagcaggatgagcgcataggcggagggtttgaaccagtcttccacagctgattccagggaactgccccactgggaatcatggttgtccacaaaggtaacggccagcgtagggtggttctgaaccagggttccgtccagaattttggaaaggtcgtaatcgcggccctgcttggaggcctggtacatgttgtagtgcagggggacgtcaaacaggtccactttgtagcgttcctccttgaggtaatcgtccagggattccagatcctgtttccagtattcgcccacggcgtagaagtctgctcccctttccttgcggacggctgccaggaatttcctgatgaattcgtcattgatatgcttgatggcgtccagcctcatgccgtccagatccagttcccgggatacccatattccccatctttccatttctttcaccacttccgggtggttgaagtccagattggcgaacataaggtagtcgtagttgccgttttcttcatccacgccttcgctccagcttttgccgtctcccataatcttgaaaatggaggttttttccgtgcgtgcgtcatagtccgttccggtgaagtggtaccagtgccatttgaagtcggaatatttgtttccgcggccgggaaagttgaagccggtccagccttcaatctcgtaggcatccgtaatttccttgtcgcggttctgctggtccacttccttggccatgaatttttccgtatagtccgcccctgctttgtggttcatgacggcatccagataaacgcctacatggtgttcatgaagagcctggatggcctcctggagttcctgcctggtgccgtatttggtgcggacggtgtttttctggtcgaattcccccaggtcaaaaagatcataggtgccgtatcctacgtcattttgttccttccctttgtaggctggaggaatccagacggccgtaacacccatttcctccaggtggggggcgtcttccttcaacttgttccaaaactgtccgtcgttgggcagattccactcaaaatactgcatcatgattccgtttttcatttgatctgattccttgtcataccgttcgggttgtcgtgcttccaggggctgtccggtggaaaaagcggttttcccgggcgaggttccggatgatgaatccatacgaagcccccaacagaatagagtcctgaaagtacggcgcgttaggcatactgccggtcttatgtcctgcaagaatgccagcggcaaaacggtaggcgggaagggtttttctccgaaggatgggaaaaagcggtttcactcccccctgccgcaccccggaaagaatgggccgggaacgagggttcgtgtaagtaagacaggtggggagaaaggttatgcctttcccgtgccgggaaccaggtagtgcctgtttttcagccggtagtatttcaggaaccggcggatgaagagcagggtgacgataaaggaaagcacgtctgccagaggaagggatgcccagactccgtcctgtccccagaaacggggcaggaccagcaggaacggcaggaggaagagcatctggcgcgtcagggacaggaagattgccagacgggcttttccaatggcctggaagaagttcccgatgatgatctggctgccgatgagcggaaaggccagcacgcagatgatcagaccgttggccgccaggctgatgagcgaggcgtcatccgtgaagagcccggcaatgccgcggggaaagaagacgcaggccaggaatcccagcgtggtgaaggatgtccctgccagaactccgtatttaagggtgagcagaacgcggcccggcttcatggctccgtggttgtagccgatgatgggctgcattccctgagtgaggccgatgacgagcatggcgaacagaataagaatgcggttgatgatgccgtaggccccgatggccaggtcccccccgtgatccgcaagttgcctgttgatggcgacggtgaccgcgctgccgcagacgtttaccaggcagggagccatcccgatggacaggatgccggtgacgatggtcttgcgcagctgccagatgccgcggcggaagtggaccgtgctggccgcatcggaaaagtgtaacagcacgcgcaccatgccgacgacctgggcgagaagggtggccacggctgctccggtaatgccccatttgaaccagaagatgaagatgggagccagaatgatgttgattcctacggaaagaagggtggagcccatggcttttttagggtagccggtagctctcatcacatgattgaggttgaagaagacgtacgtgacgggcaggcccagcaaggtaataagcatgaagtcgtacgcataggtgagggtttgcccgctggcgccgaaggcggtcaggatttccgtaaggaaaagaagcgtgggaatcaccagcaccacagcggcaatcagactcatgatgaggacgttgccaagcgtacgctcagttccttcctggtcttttcttcccagccggatggagctgatggccgccccgccgatgcctaccagcgtgcccagggcgaaagtcaggttcatgatggggaaggtgacggccaggccggacagggccagaggccccacgccgtgaccgataaacacgctgtcaatgatgttgtacagggagtataccaccatgccggcgatggagggcagggagtactggatcagcagacgccatacggatgcgttttccaattctgcgatgttgcgtgactgggctgccatggacgttcctcctttcaaaacaggtggcaaactataaaaacgcacggatgggttgtcaagctgtccacctgtccggaaaacggcctttttcccccagtttcagagagagggctgtttttgattgactgtggaagcttttggaggttgagtcctttccgcctttttcagaagcacgccatgaccatgtccgttttccctttcctgcgtcttgtctccgtttgcggcgccgctcttatgggttcttcctgtctgcccatgtttggcgccgggcaggtgctggcgggaagcagcctcgcggaaggtctgctgccctcttcctctctggatcttgtgtggaggggagacatccgttcttttccctcttccggtttgaggacgccccgcgggttcaaagtttctcccgcggattcttattccctgctgatggaagcgcgcccggggattgccggagagtgggcctgctatcatgaccgcagcaattactactgggcttttgtagccggaaagaaggaggaagaagcggggctttacgccgtgcgccgcggcgtggccgtaagcggcatttccggagaaattgaagatgcccccgccgtgcaggatgctcagccattctccgccatgtaagcacaggttctggtctttttgcaaaaaatgctgccggaaccccgttttccggcaagttggacacgataggtttgacaggcagctgttattgcgggcgtattatgaaccgcatgaagttccttttattatcgtttgcatgggtgtgcatggcttgcgccggagcatgggggcaggatacggccccgtctttcccggctaacggggccaattacaggctgtttccggcggaccggcctccgctggttcccaaaccccagcagctgcgctgggacgacagggccattcccgtgcagtccgtacgcattttggctccgtctccgtccaggacttcctatccggaacagatgaagttcattgtttccgaattgaaatcttttctggcggagcactgcgtgaaggtggctccggacgggacgtttgccgttaaattcgtcaagggggatgtgaaagccggcacggaaaattccaagctgaaggaggaggcttattccctccgagtaacttccggcggcgcactcattacggcgatggataccagaggattctattacggcatgaaaacgctggagcagcttcttttgcgccgcggcgggacgacgaccattgccgcctgcgatatcgtggactggccggattttgaaatccgcggattcatgaacgatgtgggacgcaattacatgccgctgcctctgattgcacgggagctggattccatggcgcagctcaagctgaatgtttaccacttccattttacggagaaccccggctggcggctggaatccaaaatttatccggagctgaacgcccccgaaaattatacgcgcatgcctggcaagttttacacgcagaaggagtttaagcagctggtggagtactgccgcctgcgcaatatcctgctgattccggagatggatatgccggggcacagccagatgttccgcaaggcgctcaacgtgaagatgagcgatgaaaaagccaccaaagccctggtggccctgatcaaggagttgtgttccctggttcccaaggagaaaatgcccatcatccacattggcacggacgaggtgcgcggcaaggatgagcaggtgaacaatgagattcttaaggagtacatccatgcagtggagttctgcggccgcattcccatgagatggcagcccggcctgacgccgaagggctataacggctccatccagcagttatggtccggccgccagaaccgtggcgcatggcctaccgacggagcgaagtatgttgattccctggagacttacctgaaccaccttgatccgtttgaaacggccatgaccatgtatttccgccgggcatgcccgtttcggaatgcggaaggactgggcatgatgctgtgttctttcccggacctggaaattacggatccgcgcaaccaagttcttcagacgcccgtttacgccggcatggcgttcgtttccgaacctttgtggaataatccccatgagaaggtgctgggagaccccaaccaggacgaatatatgaagtatttttccaatctgcccgtgcagggggatcctctgctgaaggggtttgcggattacgagaaccgcgtgctcgccatccgggaccgttttttcgtggataaggagtttaattacgtacggcaggcgaatattccctggaaattgctggggcctattcccaacggcggtaagacggaaaaggaattcgctccggaggaggacaacaaggcagggaagatgagggattcctacgagattgacggcgtcacctatgagtggtccggagacgattacacgggggccaccatcattttcaagcattactgcgattttccgacgctgttcaatggcgcaaagatgggagcttatccccacaaaaaccacacttattacgcgcagacctggatttattcccccaaggcgcagacggtgcctttctggatcagcggacatacctgggccacgtccgattggcgcaacggtccggcgagcgttcccggcaagtggtttcatgcggatcccaaattttttgtgaacggccgggagattgcccccccgcaatggaaaaagccgcgtaacagcggcgtgatggtggatgaaaactaccatttccgggagccttccatggttcctcttaagaagggttggaaccgcgtgctggtaaagagccccagcaacaattccgcgcgtcggtggatgttcacattcgttccggtgctggtgaaccccaagacgcccggctgcaatgtgaaggagtatcccggcctcaaattttccacacgtccggaatagaaaatcccgtgatgagcatccggagctggaatgagccggttgcagtatccgccatcatcattaaaaaagaagccgcgcttctggcaaaagcgcggcttctgattgcatgcaaaggacacggatacgaagttaagcgctccggcggcgcgttatcggagcggcaagtcccggcaggccaagggaagccgagtccagttccggcacgggaagagccccttcattgtagattcaatggagcagggtaaccctgtattgtcacagtattttccagggaatatgttccaatagttcgtcaaagccgagccccgtgcctccaggaacagctgcctgaggggccatgcctcccatccggtctataaaggggtccggctcaaacaggaggtgggtgcagaggccgcagaggggaatttccgtgggcagggagttgcggtaatattccgccgcctggtaaacggcccagagctgccctacggggtgatccatgacagtggtgaagacgggaggttcgtaaagatattccggcgttgcttcccgtgcgggtttgacgatgcggatgatgggcaggtccgaggagatggctggctggtgttccacatccgaacccatgtccagggccagaggcatgccggcgtctaccagacgttcccagctctggatggagaaggggcacgggtcttctatgaagtctattctggttttcagatggtggggcagggatttccagaatttcagggcatcgttttcattcaggcatccgttgaagtccagccgccagcgccaggagggaaccatggatgccagcatcgtcagccgttccagggcggcggccagattggcgctggccttaatttttcctgccttgaatcccttggattccatgatgcgaatggtagcggggctgacgcaggagggcagcgtggcgtggctttccggaatgtgaagaccgtcaaacaggctgacgcccctcgcgcgtgcttccccgtccgttcgggcgcactccgcggcgcgaacgcccagaggcagagggcggcccttcctgagcgcgtccaattcctcttgcagggtggcgtctcccagttccggccacggctggatgcagccgtacccgccttcatccgttttaatgagggctcccttcctgcacacttccgcggctctggcgttcagagggccgcaggctgttaaagaatattcatggtaaaacacaactttaattcaaacaacctttccttcttttgtcacgatgaaaaaaggttttcattggattttggagggtgaaacgtctaagctctgcgtcatgtacagaacattggtgttcggggcggacggccgggtgggaagccgtctggcagcgtatctggaagaacatggcctggaggtggtgaagtgcggacggggcttttgtgatttgaaggatttaagcgctttgaaacgtgttctgctttcttccggagccactcatgtggtgaattgcgccgctgtgagcggattggaagcctgcctggatgatccggagacggcccaccgcgtcaacgccatggctccggagatgatggcgcgcatttgccgcctggagggcatgcgctttatccatttgagtacggattatgtgctggacggcaggaggagaggtttgaaaacggaggaggggaagtgccgccccgtaaatgtgtacggagagtccaagctggaggcggaattccgtgtgcgggaggagatgccggacgctctgatagcccgcgtttcctgggtattcggcaatccggaacggccctcattcccggaaatggtgctgcggcgggcaatgaaaagggagcctctggccgctgtggcggataaatggtccatgcctacatggatggaagatttatgtgcatggctccgttttctggcttatgagagcggggcgtccggcgtgctgcatctgtgtcagtccggagagcctgtttcctggcacagttatgccgtggccgtgctgaaatgcgccgtgaagcacgggttactgccttctttgccgcctgtggcggaacaaaagctcgacgaacaggccggtttcagggatgctcggccccggcataccgccatgtccagcgaacgcctctcttccctgatgaagcagcccgtgagggcgtatgaagaggccattgacatggccgtggcccgctatgccgcagatccaacctttctctccagcatttcatgaatgatttccacaattcccgtgattcccgccccaggcccgtttaccgggaccgccgttcccagccgggccgcccgcgcacagctcccaaaaagaacctttttgccaacaagtcgccggaagggagcgaacaatggctcaagccctgggtggagctgaagtatttcacatacaatccggccgtgttcccccgcatgctcggctccgtaagcggggaaatagcgccgggaagcctggtaaacgtctatgacaagaacggtgaactgttcggcgccggattctggaatgagtccagccgcacgcctctgcgcatggtgtaccacgggaaggacgtttttgccgaacgtgacctggatgctgcgctggaacgcgccgtgaagctgcgcagggaagttctgcgcctggatgaaaccactaatgcgtaccgtgtgctgcacggagattccgacggactgggcggcctggtggtggaccgttacgcggacgtgctgagcctggaggtgagtacgctggccgtctggcagaggctgaaccgctggctgcccctgctgcaccgcctgtgcggcacaaaacgccatgtggtgcaggtggatgagggcattgcccgcatggagggtatccgggcggaggaggcgccggcatccccggcccccgtcaggctggtgaagattgtggaaaacggcatcacctatgaagtggactttgcccaggggcacaagacgggctttttctgtgaccagcgggacaaccgcctcaagttcgcctccctggtgaagggggccacggtgctggacctgtgctgctacagcggcggcttttccattgccgccaagatgctgggcggagcggcggaggtaacggctgtggatttggatgagaaagccgttgccatggctaaaagaaacggaaatatcaaccatcagcgcatcgacttcgtgcatgcggatgcctttgtctatgcgcgccagatggtgcgcaacggccgcctgtttgacgccgtgctgctggacccgcccaaattcattgttggcagggacggatatgaagagggcatcaaaaaataccatgacctcaatatgttggggctgcaatgcgtgcgtcccggcggcctgtttgtcacctgttcctgttccgggctgctttcccccgcggagtttgagcataccgtcatcaaggccgcccagcggcaggggcgcaagcttcagattatggcgatgaccggccccggctgggaccaccctttcctgagcacttatccggagggccgttatctgaaggttctgtgggcaattgccctgtagctggaggttgaggcccgggatgcatttcggaaaaacctttcaggcgtgttgacgttctttgccactctctgctttcgtggtgaggaatatggcaaaacaagtattgcagcggctcagttttacggccggggagctgaccccgtggctggccggacgcgccgacctggatcccgtgtcccgtggtgcctcccggctgataaattttctggtcagccccttcggcggtctccggcgcaggccgggaacacgcctggtcgcccgcgcgggatgccgggagggcatggtgaggctggtttccttcaagtactccacgggcgtgcagttcatgctggaagtggggcgcggctacgtccggtattttaaaaatggcgcgcttctgacggatacggaaggcggggtgctggaaacgcttactccgtggaagacggatgaacaggtaagcaacctccggatgcagcagctgaatgacgtgatttactgcgtggaaccttctacgccgcctatgacgctggcccgctacgcagacgatgactggcggctggaagcgttggagttttccggaattccttatgagagttccctgttgaatgccgtgcggctggaatgccgcatggtgcgggaggggagcgtcaacaggctgctggcgacggcggacgatgatgtattcactccggaaatggagggaaaggagtttctgcgcatcaccaggaaatatggagaaaccgtggcggagggaaaccagatgcctttttaccatttgacgactctgagccgggatctttacaagggagagactttttccatgaaccgggaggacggctggcggcaggcttatacctgcatccgcgatttcagccgggaaagcgactaccaggaaggggtggaccgcccggagaggtacacggccttttttgaaaaaggggccgatgccagtacccgcatttatgtcaacggcgcgtggacgttggagacgacggggacctgggatgcggaatgggaaatctgccgggggtatccggacggctccaattaccttcccaaccgtccggaattagtgtggcattccgtgaagagcttccagcagagggagggggtccggaataatttcaccctgagcggcaatgaagaggaaatgtcctactacaaaatccgcctcatggcttacaaggacgggtcttctgcgggaacgcccgtattccgcgcatcagccggctcctttaaccatgaagtggtggtggaggaatatgtttccccgcgcagcgcctatcttgcgagtgcccttcatctgtcctatcatacgctgagtgactgtgataccaatgactggtcttttggtgcgttcggggtccggaacggttatccgtgcacggtagagttccatcaggggcggctgtggttcggaggcactcctgggcagccccagacgctgtgggccagcagggtggatgatttttccgcgtttacgcccggcattccggcggattcccccatgattctgacaatggccgcttcccagcagaactgcatttcctggatagcttccctccgggggctgatgattggaaccagcgagggggaatggcgtctgtccgccaccaattcagaagggttgaatgcctctaatgccggatttgagcgccattccggcgtggggtctgcctccctggatgccctgtctgtagaaaacagccttctttttgtgcagcagggcgggatgaaggttcgggaattattttattctctggaggccgacggttaccagacaagggatgtgagcctgttgtccgaccatttgctgggggagggaattgtggactggactgtacagaggagcacggcgttccatgtctggtgcgttctgggtgacggcagtgccgtatgcatgactctgaacagggaacagaatgtggtggcgtggcatgcacaccgcctggaacacggccgcattctgtccgtggcgtccctgcgcggttcccgcaacacaccggatgaggaagtatggtttgccgtggcgcgcggggaaggggaggaggcctgcattacggtggaatgcatggcggatgggaatgcctgcctggatgcctgcacggaggctgtcgtgaagggggagacgctgtccggcctgagccatttggcgggatgcagcgcctttctggtgggcggggacggcgcatgcatggacatcagcgttgacggagccgggaatgccgcctgtcccggaaggggggatggggaaacagtatccgtaggcctggccgctccggcggaagtaaggacgatgcccctggaaacgcttgagacgctgggttgctttaaaaagcaactcggtgcgcgcgtcctgcttcatgaaagcaccctgaaattccgctacggaacgggaactccggaggcatggaaggatttccagcccggcaggtacagtgtttccgaaccttactccggctatgtgcggatgattcacaactatggtatggatgagcagtcttcctttgccctccgtgtggagactccggctccatttaaccttctggccctggtgctggatgtggaattataggcgcaggagtgcgtttacggctgttcagccgcctcttcatgggaaagcatgtgtacaatgaccttgatgccgtgtttttctccagccgccttcgccagggaacgaatggcggaggccgtcattccattgcggccgatgatgcgtgccacgtccgttttttccagaatcaggcggaagcggacggcgtctccctgcggggattccgcaacgcgcaattccgcctgttccgggtgttgcacgaattgcagggcgatcaattgcaggtactggcggatttgttctacggcaggatgcatgaagggaaatgtgggttattttcatgaaccatactataaagccgcctgattgaaaagatgcaattccagacattccctgaaaaagaaagtcgccccgaccgtaaaacggccggggcgccccaactaccctatgaaactggatcggttaagatccagagagcttttttaacgagcgctcacctgctcgaggcgcaatatagtggaggaaaaggggatacgcaagtattttttcattggaacgatgtttttgttcaatggaaatagcatcgtatttttacttcattttgacaatatcgggaccggaggaatggttattgttattgtcatgaaatcatcttccgggaagcagttcatacgtgaaccccttcaggtattccgtttccggaatattcaataaaaccggatgatccgctctttggccgtgttgctgcatcagacgcagggtggccggagcatcaatggcggcgtcaagcacgctctcccggaacaggtccgctccggcgtggtgggaacagcagaaggtggaaaggatgcctcccggggccagaagcttcatggcgcggaggtggatttccttatatccgcgcatggcgtcatgcacggattttttgtttctggtaaaagagggcggatccaggataattaaatcccatttgtgttctcctccgtcccggacaagggctgcttcctttttcaggaagtcaaacgcattatccgtgacacactgcacggagactccgttcaggcgggcgttccgcgctacggcgtccatagcatcctgggaaacgtccacggccgttacctccgaggcaccggcaagggcgcaggccagggcgaaaccgccctgattgcagaagcagtccagcacgcggcgtccgcgggcgaagcgagccacggcggcataattgtcaagctggtccagatacaggccggttttctgtcccgtctgaaggtcaatcatgaattgcacgctgccgctgcgtgcggcaaaaggttccggttgctgtcctcgtgccacccggacggagggggaaataccttctgccgccagcatgggtgaatcattcctgacaataatcccgcggggagaaagaaggtcttccaaaacattcaggatgatggggaggcggcattccatggcgatcgtcagcgtctggacgaccagataatccgcgtaacggtccacaatgaggccgggaagcccgtcggattcgctccaaacgagccgggtgagagtttcttccggaagccggcggcggcgcagttctactgcctggctgatgcgcctggaaaagaaatctccgttcagttcctgtttgcggcgggaaaagcgcctggcgacgatctgggaatggggattgaacatggcggaacccagaaagcggtccttgaaatccttcagggccacgacgtcccccggctgcggattgccgaaaattttgcgcacttccgtgccgtaaacccagtcgtgcccttgaaaaatgcgtgctcttggagaaataatcaaacctgccatgtcaggaaaggcaatacatgatcggggtggaaagttcaagggtaatgcgggcggctcccagaaaggccgtgggaagggtggaggcctccgttccctgggatttttcgcgcaagtacgccgctgtgcatcattccgggactatttcggttgaaaatgcccggaaacgaagtaaaatagggcgcgttatgaaagtagaaacttttgaaactccccaggatgctgccaaggctttggcaggagaagttgcggaattgatccgtacgcgcgccgctgaaggcaaaaacgtggttcttggccttgccacgggcgccactccgctgcctttttacgcagagctagtccgcatgcataaggaggaaggcctttcctttgccaacgtgatttccttcaatctggacgaatacagcggcttggatcgcgaccatccggaatcctactggtacttcatgcacacgaatcttttcaaccacatcgacatcaagccggaaaacatcaacctgccctccggcacggtgaaggatgatgaaattgccgcccactgcgccgcctatgaacaaaagatcaaggattgcggcggtatcgacctccagattctcggcattggccgaactggccatatcggctttaacgaacccggctccgatgataccaccgtcacccggcaggttcatctggacgaactgacccgttctgatgctgctcccgctttcggcggtattgaaaatgttcccaccaccgccattaccatgggcgtggctaccatcatgggcgcccgtgaagtggctttgatggcctggggagaaaagaaggcgtccatcgtgaaaaaggctgttcaggggcctgtgacggtggatgtggccgcctcctaccttcagaagcatccgaacgccaagttccttctggacaagggggctgcttccctcctttaattttacgttttagtaacggaaatgccgtctttcccggtttcgtggaaaggcggcgttttttatggggtgaaggaaggcggaagcttcttttttccatggaagttatatgggaaatgccgcctatgcaggcaaaaggagaggggtggaggctgggcagggaggattttgtatcatcgtatgctaattcacacatcagcgcagcgtacatttcaaactattaacatgtattggcgggtactggatggcatccgccatttttattggagataatcggggatttttccttcatcacgtccgggacgtgttgttgttctttttggaattccttatgttcatttgagaactaaatggttagttctcagacaggaaacaattcaggaacatgaataattatataccactaaacaaggcggtcggcccgaagcttatctgcgacggggagcaggctctcatcccgcagaaactcggagttgacgcgatgacgttcaactttgacggttcggcgtgcgaacacgccacttgcgccggagcgccggaaatgttcatcaaggttgaggaagacggcctgtattatttcggcgtagaggccgacgacacaggcagcatctccattgctggcgaagaactttgtgagaaggatgggacaccgcccaacggcaagctgaatctggcaactggtatcaggtacctgaaagctggctattacaaggtggccttgtcttacacgaataatgcctacccccccgtcagcaacaacgctgccgcgttcaatgtgacgatggacagggaacccattcaggaagggaagtacgaagggaactcgacgatgaagcgcgaattctcgtcgtcccccaaaatcaaattgtggacgattgagaaggaatccaccattacctgtgaagagtccaggaaagtggaggtgacgctcgaagaacctgcacccgttatcaaaaaaggtattggcgcttgcaaaacgaaattcatcatcccgcaaatcatcataacggcttgtaaggatgaagtgcttgagcgatggaacccgcgcgtccaacaagtttctgccggttccacgattcttgtactcacgggaacttatagagacgccctcaaaaaccctcccgttaccgaagatgaagccgtcgaagcggtcactgtaatgaacggttatcaatctcgtgcagaagttggaatatggcacacgtcggaagcttccctcgctcacgaagaacaccatcgccgtcaatacaatgatgcctttaaattctactgggacaatttgagaatacaggattcgatcgaattaaaacctgtttcctgcgaaaaatttccgaaaatggatgatgccttggcagaaatgaggaagtccgttcttaattggacaaccacctacttgaccgctgttaagcactatattgaattgttgccggatgatgccaatgatcgtccctactgtgccggacaaaaagttctgaacgaggcgacccggaagattattgcccaggcaaaggccaatggatggagcagggtacctgatgaagtcacggaaccgggaacgatcgaaccgccctgtttccttccgcctgtcaacggcatgtatgcccgcagcgtggctgctgcggaggaaccggcatccttgaccctctccattgcggatacctcccggttcagggaaggcagaatcacagtccgttttcgcaacgaaggaaacgagcctgtccggattccggacgaaatcaacgacgaaacagccgattactttttcgtgactgtattgaggacggaacggggagatgtccgcatcctgaacagggaaattggcaccatgaccttccagcgacccttgaactaccgggagcttgctcccggtcaggaatacagcgtcacgattccggtatgcctggatgaagtcgatctggaaggctggaaacaatgttcttgtgaactggaaacgcgctactataatcagcagggtgaaggttgtttccgggggatgctccgggcgacggccaggctcgcgctgcaatgaaaaaaatcttccggtatttaatacttctgacaagcctgtccctccatgcggttgcgtggggggacatggccgacaacggagtggaatgttccgtggtgatggaaaagacccggtttgacgcaagagagacgttccctgacttcaaactggtgttcacgaacaagggcgaaaagaccgtgcgcctgtttgacgacttctatcccctcaaagatgacggccctaatatccgtatcgaaatatgggaaaaatcgggagggaaaagatatgggtacagagtgggcaaaatagagaatccaatagcctgttatggagccgggtataaaatcgaacgggtagcggctttgatacgcttcattacgttgaagccgggagaaaagcatgaagtccccatcaaggaagcttacctgttgctgacgtattttgaccgtcttcgcaatggtcagaactatgagctggaagtacgtttcagggatgaacatgcgtatcccgatgctcggagggtgtatgtagggaaggcagaatttagtttgtcacgccggtcgcccaaaggagttcctcggtgaataatccagactgttggaggacatagcctattgttcccgttcttccaataacccacccaccagagagccagttatctattgttcagccatttgttccctgattatctctgttccttgatacatttttttattatttctgagaaaggacaggttagttgaaataggtgaattaagggttcaatggcctgaaacctaataacgacgggggagaattgggacgatgggcgtagttttctccttatcattcgaaaatgaagttatgaattatcgtggaagaaatcttcatcacctgtgaagaaaccaaggaagtggaaatcggttttgaaggaatggaaccggttattgcagacgaagcatggaattgcatcactacgcctatcattcccagaatttttgtgacggcgtgtaaggatgaagcagccgatgtctggaagctccgtattgagggagcggaaaggcgatccggcaatgtaggcggtaatttatcagtcccattgtcttaaatgggattccaaatttattggggtatcaaaaataccagtattttcaagttttgatcaaggaggggaggtttgtggactttgaggcggaattatgggatgacaacaggtttgaggaaaactgttgaacccgtccacggtgtgccgggaggatttcttcggacaggaaaaggccggggctatttgagccatgccaggaattcatggttgccgtcagttcccgtgataggggaaggttcgcaccccatccaggaacggttcagttcgtccgtgacgaaagtgcgtatggagtccaccgccctccggtgcaaagccgggtcccggacgatgccgccggggcctatgtcttccggctggagttcaaactggggcttgatgagcaccagggcatcccccccttgtttaagcagaggaaaggcggcgggcaggatttttttcagagagataaaggagacgtcggaaacgatcagatccacttgttccccaatatcctccggagtcatgtagcgggcgttgaatttttccttcacaatgacgcggggatcctgccgcagtttccagacaagctggttggttcctacgtctatggcatgcaccctggcggctccgtgctggagcaggcagtccgtaaaacctccggtggaagccccaatgtcaaggcagaccttgccttccgcagaaacggggaaggcattcagggctccttccattttcaggccgccgcggctgacatagcggggacggtttctaatggtgatatccgcgtcttcattaaccttgagaccgggcttggtggagggatgcccccccacgctcacttctccggcaatgatgagccgctgggccagctcccgggattctacgagattgcgggaaaccagaaggatatcgagtcgttgcttgctcatgattcggaaaaaggtgtgaacgcaggtatttcatgaaaccgcatgaagaatcaagaaaaaccgagcgcagagaggcattcgggcgtaaaaatgcggcattcctcgtactggagcattttacgattgattcaaggccggtttataggagactctgcggcggatggaacaccgctacaggcaattgatgcgcagagtcaggctttacctgctgacggaggtgcgcaaaaaatcgtgggcaagcaagttcctttccgccagggtttttgattctgtttactggtcatggaacaggcagtccgttgcaacgggagctgcctggggggctgccgcagcgattgcccctcttcccatgcagagcctgtggggcgttttcgcctgcctgtggcgcaagggtaatattcccgtagccattctgatggcgtggctctcccctcccggctttaccttttttgccattcccgctcaatggtggctggggtggttccttttttcgattttggggttccctacgtccggcgcgaactgggagatgctgaaagcgggggttcagcagtggtcctggacgccgtttggcggattgagcatcggcatggtaagcctgggattcgcagcgggctgggtggtttccagcgttgttctgggtagcctgtgttacgggctggtgcagttgggatggaggatgggccagttcctgcacagcagaaaaaagagcggcaagttgtaatagcaaaactgccgtctgtgcaaggcagggcggaaccggaaagccgggcagtccggaaaaatcagacggctacttccatcagcaaaacggttgagttctggagggcttctatggagacggtttccgtatccgtaattccggctccgtcccgactgtgcaatatggcatctcctatttttatttctccgtctatcacgaagatgtatacgcccgtgttccgtcccttgaattggtattcccgttctatgcccctgtccagctccgcccaggaaaaccaggcctgctgcatgatggagatatccgtttccggagccaggaaggtagagatttcattatgcttcaacaggggggtgatgtcgtaatcccggtacctggggggcgtgttgatcctgtccggaatgatccatatttgcaggaattccaatggttccgtgaggctgtcgttgaattcgctgtgctgaatacccgttccggcgctcattacctggatttctccgcgcgtgatagtgtggctgttgttcaggctgtctccgtggcggagccttcctttcagaggaatggaaaccacttccatatttttgtgcggatgggtgccgaagccttcttccgggagaaccttgtcgtcgttgagcacgcgcaaagctccgaattgcatgcgttccgggttgaaataattggcgaagctgaatgtgtggtatgtatccagccatccgtggttggcatgtccacgggaggatgcacggtgaatggtaatgttcatgattgatatagggggagtgggagcggttttccgcctgcagaatgtttgaccggctgcaactctgggctgttcaaggcgaatgacattatttccaggaccgtaaaataaatcggcaacacaaattggtggtgcaatgtctcttcttttagggtagcgtgctgcagtacccgtgcaaagaagacaaggcttatggctcagcggacatttatgagatggatcaagggactgattcccacagtgattattttgctgggggcgttgttgctgggctgcatatgctacatctccatctggggggtgccttccttcgttgtgcagcgggtggagcaggctcttctggaaaagggcattccctcccatatagagacgctgaaagttactttgtggccccgtgccgtcgtgacactgaaaaatgtggaattgctggatccggaggccatgccggaaactcgccggcccatagttctgctgcatgaggcggatgtggcgctgaattggaaaaaactgatagaaggacaagtagtaccggagcgggtgaatgtgaaggggatggacgtctccgtgcccgtagatgcggggaatctggaaaaagttttttccgtaacgggggtgaacgcggaattgaatctggggcggcccggcatggtggacatcgtcaaggcagatgccgtagtgcagggcatccgggtgacggcccagggggcattttccattggtcaggatgattccggagactttacgctgacggctcaggatatgggcgccgtcagagagcagttgaatcaggtcctgaattacatggaccgggtgaagtggcctgatgcatctcctccccgcctgattgtcaatttaagcgacgatccgaaaggcggcgtgcgtgtaggcatggatttgcaggcgccttttctcaggtacggaaaaatcatggtcagggatttcctgttcagcggggattacgcggattccgttatcatggccaaacactttaccatgcgggatgcggaaacggccggtttcgtcagcctttccctccaggccgatttgaaaaagcgcacgctgatctgggatgtccgcagtacggctccgctggtctcctgggcggtggctattgttgatgaagctctggtgccgaaggaaatgaagtttctgagcgagccgcatgtacagatatccggtcgtgcggttttttcggaaaattgggaaggcgtggaacatctgaatgctttaggttccggatccatgggagcattttccgtgcttggggaaaaattccagagggcctcctgcgatttcagttatgaaaacggtaatttttatgtaactgatctggatataaggcatcccggaggcagtttttccggcaaggtaatgggagtggacggagagattaaggtagacgttcacagcacgctgcctgtgaaggcgatgctggggatggcccgttccattgccccggaggatgcgaagctgccgccagcgctggaaatcaggggagacccggaattgaaggtgtacggttccgtggatatgggaaaggggtggaaagggccgttccaggtggaccgcctccagattgaggcttccgtggcggatgtcttttaccagggagtggaattcgtttccgctgcggccagggcggaattgattggccgttccattaatgtcacccaattggaattggtgcgggatgacggccgggtgaagctggaaggaagctatctgggcaccgaccttgtttttacgctggaatctaatctgaagcctgaactgctggagactctggctggaaattggttttctgtccctgaaaatttgcagcttccggaaaaagcggttttatgggtgcacggcaggctggatattccggagggcaagcctgtggagccgactctggtccgcgcacgcatccatgcggagaatcttgcctggaacaaggttcctgtcaaaacggcggatgtggaagcggaataccgtcccaaccagctttttgtgcaaaattgccggatggaaatggaaaagggcgtctttgaattgttcgccaacggttttctggacggtcagatgtttgtgatggggcagtccacggttcctttgcaaacgatagaccaattgttgagcatggaggatgacgactttttcatgaaccgctttgtcttccgcaaggattccggcctggagttttccttccagggaacgttgggtttgtacaatctggaaaaggcttacgacttgcaggctactgtttccgcaaccaacacgcgctacaggggggtggacttgaagtccgcccgggcggatgcccatctggtgacggaccagctggtgctgaccaatgtgacgactgtggtttccaacggaaattacctgtcttccgtcggattgtccggaggcccttcggaatgcacgctcaaggccaagagcatagattttcgttttgtgcaggatacggtggaagtgcttggtctggaggggcaggcctatcccggctataccctgcggatgttttccaatagtgccgccagggttttgaaggagtttgtctttacccggcccgtaacgctttccggcggcggcatgtttccgatgggggatgacatgaagctgatgaaggggcgcatccgttttgacgcttccgccgggcgcgtgcgctatcccctgctgggaaccacgctggacctcggaaggacaaagggggaagtgttgatttccccgcaatgggtggttgtggacaagatgatgggaaccatctgggacggaactttcacaggccgcgttctggcgcagattgatgatggggatgccctgaacggttcttttgtcctccaggacatgaatttgacgtctatcgggaaatcctatgacaaaaaaatggagaaagccactgtgcacggagccattgagttttcatccaagggcggcaatatgaattctattcaggcgaagggggaggctgccctggtgcatggcgacctggtggaaattcccctgttcggatttttgggggaagccctctctaattacattccaggactggggcatctgattaattacaagatatccagggccgattgcgatttttccattgagaagggttatgtgcgcaccagtaatttcgtggcccagggaagcaacatgtctctggaggggggaggctggatacgcctttccgacttgcaggtcaattcagatttcaagctggggcttcgcggtttgccggggtttattacttccccggttttcctgttggccggagggctgtttcaagtgcggggagcggggcctttgagcaatgtttcctggagtttcgctccgttttccggagggaaagcccccgttcctcccgccgcggcgcctacccggaaaaggtagggcagacgaaatatttgggtgttgcgcaactgccgtaaggagccgcatgccttgcagcaattgaaaataacagatgccggatatctgacagaagataaagagctgtaaattcagaatgccccgtttacggtgctttccctcaggaaaaggagttcccggagaaatttttcttaaaccagagtataggcggaaacagctgtaatgctcaatttctgtaggaaagaccagtgaaacaggaggtttttccccgggaatgaaacccggggctgaacggtgccggagcgtaaaaacgtatgaactatggagccggaaggaaatatccccaccatgcaatcctgaagaaggtgcaggagttccttcatggaaaagacaggctgccggtttccgttgaagtgccgcgatttgcttcggccgttctcctatgtgaacgcccgcctgcatgttccatacgggaagatcgtgcggtccggtacgctgctggctggatggtaataagccgattccggggccggatcggctgttcccggcagggcggggccataatggcgttcttttactgaggagaggatgtggctttaccggaaatagtctgcggcaggagaggcggttttaacgggtaaaaaagcaaataaggcaggaggtgttggcgtaaaagaaggaagtttttattccggagtgggtccgttaaaaacggggcggctgaactgctccagccaccccgttgaaaaagggagttatttaccggattttcccagtttgtacccggcgtaggtttccgtgttgtacaggggctggttgtccggcacggcgtaaccgatggatttgcgaatggcaaggaagtccgccacgccttccggccccacctggttcagaggtgctttgtgcaggccggccatcagcaccatgcggcagtaggcatccgcattttccatgaaccattccgcttcttccacgtcacgtgctccggtaatgactccgtggttttccatgaaaacgacggtggattgtctggctgcttccgccacggcccgggccgtttccagagagccgggcgttccgtaaggggccagcgggatgtgccccaggaagatatccgcttccggattgatgccggagggaggaacctgcccggcaaacaggaaggcattgcagtgcgggggatgggcatggatgcaggcattgacgcccacggatttcatcatggcaatgtgcgttttcacctcgctggtggaggggcggatgcccgccttctggcgcgcgtccatgtccaccatgcagatgtcttccacagtcatgaagcctttggaacacagggtgggggagcagagcagcaggttctgagccacgcgcacggagatgttgcccccgttgccgtccacatattcccggttccacaggcggcgccctatgtcgcacatgcgttccttgatgaccagaatttccggggaatggaagaattcgttcacttcctcccgcgtgacggggttatatttttcccatgggaacactttgtccggcaggggaggggagattgaccagtcttctgacatatttagtagcgtgttattggttgaacttttcgtaggcggcttcctgggaacccggcatatatgtccggtaggtgatgccgaaggcggcccgggcctgctccggcgtagagtacaccccggcgcccgcaaaggcaaacatggatgcgcccaataccgtactttctgacacttcagagactttgacgggaatccggagaatgtccgccctcatctgggtccaaactctgtttctggcgcctccgcccaccaggatgaggaattcgcttttgaagccgcccacggattccaaacggcgcaggcgggatttcagccgccaggtgagagcctccatggcggcgcggtagatatggccgcgtgttcttcccagcaccagtccgttgatggagcctttccggtctccggaggccaggaagtccggaaccattgtcacgccgtcgcagccgggtgggacggcggccgcttccgcatccatggtgtcataggattccccgtgaaagcaggctgctttcacccattcgataatgccggagcccagccattggagcccggggttaagaaggccggattccgcgtcgaattccgccgtggcgccgtcctcataatcttcccgggccagcctggcctgtgcggagcgcgccatcaggatttcccatgttccggaggaaaggacgggctgattcttgtctgctccggaaccgaaaatggcgaactgggtgtcgtgcccggcggagataacgggaatgcccgccagggccgggagattcatcgcgtctgccgcttccggcgtaagaaggccaatggtttcccctgcatccacgatgggggggaagaggccgcggctcaaaccgaggcggttcaaaatgaattcggaaaaatctcccgtttccagatccgtgagctgggaggtccctgccatggtccggtctgtcgccatgatgccggtgagcttgtaggccagcaggttggagatgaagagccacgcatgggctttttccagaagttccgggcggttttccctgagccagacgagtttgtaaatggtgttgaaagcaaaggcccccacgccggagatacggttaagttcctcctgggagatatatttgccgatgtttttcatgacctccgccgtgcgggggcatttccaggatatgacaggatagagcaggttgccggcgtcatccaccagcgcgccgtccacgccaaaggtggtaatcgtgacggccgtcacctgttccgcatttagtccttccagggctttcacggcacattcggagagctgtctgaaaatccggtcggcatcccagacgtgaaattccggattttcctcaccgggcagcgtggcgttcggctgtgaggccttccccacaatgacgccttgtttatccacaaccatggcgcgcacattagtcgcgccgcagtccaagcagagggagtacatgagttaagatttaatagtgaaaagttaataggaatccggctgagcttgttgagttggtttgttaatagaaatgagcattttagggatttctgtgctgtcctggttgacagaggaagattccgtttccgtcaggcttcccgtggcgcgcagcagtttaggccgtgcatgcgtcccggaatattccttcagggcgatgcggggtttggaaaagaagtcccttctgcggctcccgtaaacagcttcggataaattggcggcaatgcccgcaccggaacgtaggagctggctgagcaattcccgctcggcgtcctgctttttcaagtgcctgcatcattgaataatgcggactgcgaaagaaaagcttttcgcggaaacgggactttctgccatgttttatccgaagctgttaactattacctattaactgttaccttttcgttttcagtattttccgtataatggcccgtagttggcgcaggcccggaaatcagctccttccgggtccgccgtgccgtggagaccccaggcagaggggcggtagatttggtcatccggaatgttatgggcgtatacgggaatgcgcagcatggaggccagcgtcaggatgtctgcgccgatgtggccgtaagtaaaggctccgtggttggctcccatgttggccatgacgctgtacacgtccgtaaaggctcccttgccggtcaggcgcggggcgaaccaggtggtcggccagcccgggtcagtgcgttcgtccagggtcttgtgcacctcggcaggcagatcaacagaccagccttccgccacgatgaggacggggccgagtcccttgacgatgttcaggcgcatcatggtgacaggagcgccgcccctggtgacgtagtggacggagtagccgccgccgcggaagtattcccggttggccgggcaccagacggcttgttccatcatggttttcgcatcgtccggagtgacgtcccagtgttttttcatgacgggctgtccgtccttgcccgtgcaggccatgcagccgtccagggcggcggagccggaattgatgaggtggatgatgccgtccttggcatggccttccagcgtataacccgtgacgcgctttacggcttccgggctccagtaggtgcgaacgtccgcgaagacattggcctgtccggtcagcagatagccgaagaggaggcaggcgccgttgagagagtcattttccgtggcgaagggaagcggggcgcgcgggccgttccagtcaaaggtggagttaagcagggtttccgcgatgtctccgttcgggtagaagtccgtccagtggcgctggccctggaagccgccggcaatggcctggtaacccagggattcttcttcgcggtcgattttcttgagtttgggattgccctgcatcatgtcgcggaagatcatggccatcagcacgctttccttgaaggttttgcggcgtccggcttcatccagcttcaggtccggacggtttttgtcctcggcgaatttaaagacggaatccgcccattgcatggcgaggtcgaattccgcttcgtcataaattttctggtccatgcggcggcgcacttccgtcatgtccacggcctgtacgcggatgcccaggtaattttcccagaaagactggtccacaatggaaccggcaatgcccatggagcagccgccgatggaaagatagccttttccgcggagggtggctacggcgagaccggcgcggcagaagcgcaggattttttcagctacgtcttccgggatggaagtatccgtggcgtcctgcacgtcttttccgtagatggagaaagccgggaatcctttctggttcaggccggccagcgcagcggccagatacacggcgccggggcgttccgtgccgttgaagccccagatggccttgggagtgaacggatccatgtcaaatgtttcactgccgtagcaccagcagggcgtaacggccagggagacgccgacgttgttggccttgaatttgtccgcgcaggcggcggcttccgccgggccgccgatgcaggtgtccgcgatcacgcatttgacgggttctccggaggcgtggcggatgttggcctcaataagggcggcggccgccttggccatgttcatggtttgatcttccagggattcccggacgccgaggcggcgaccgtcaatcgtggggcggataccgatggttggtaatgctgttttcatatcttgcgtaggtgatgtgaagctggttcatgcctgggcaggcttttcttcctcttcctttttcagatgagtgttgcggaagaagaagccgtaaattagtaccacggcaaagcagatgatgggaataaagaaggatgaccgcaccgctttttccacgaagttttcctgggccgtttggaattgcttcatgtccaggggcagggcgatgaggttgtccagcacttccgcctggtttccggataacgtggagagcgccggaatcagggagaattgctgaatttgctgttctcttccggcaggagcggggaggcgttccagattggctttgaaaacggccagttccccaggcttgagggaggagcagccgggcagggatttggccgcctgctcaaaagcgtccccttccagggaggggagggaaaggaaggtttccaggtttttctggaatttgccggcggccctggcttgttcttctccgtccgcagggctggcttctgacatcctgtacagcgccagcatggctccggataaggatttgcgggcgtccgcagcttccgcctgcgcgatcagaggacggttgatggattcaaaataggccacctggttttttactgtggtgttgtctatccaggaacccatgtacggggtaatgactgcgccgcccagaatggccatgataaggcccgcagctcccagtttcacttcagaccccagtccgcgcagggcgatgccgtaaatagtggggaacatcagggacatgcagccggagattccgaccagtgtccagacggagatttccctgggcagatagatggtgcccaggcagcagagaatgccggcgacggcgaaaagggacatcatgttggccgggttaaattttttcatcagggccgtagtgatggcgcggcaggcgatgaacaggatgatggaaaagatatagtagttggaggccgccgcttcctgcattccggggaagacggacatgatgtatttaatcgtccacgtccacacggcaatctgcacgcctacatagaaaaattgggctgccacgccgcagaagtagcgcggaagcttcaccagtttcataagctggcagcggtagtccggcatgatgagcaggaaggcgatgggcccgatcatcataatcaggatttgctgcaccatgctgaattcgaaagcggaatagtactggaacaggaaggggatgagaatcagggcgatgcagagtcccaggcggccgagtttagaggaaaggggctgtgtgttttcccgggtgggtacgttttcatcgtcggatttgtaacggcagaaaaagaaccagatgacggcggcgatggctaccaggcccacataaggaacgcatacccagaaaagttcatcgctgacaatggcgttcagttgttccgggtccatggctttgcgggtgtccatgtccgcatcgttcaaatgcgccagaatgaaatatttggccaggaaaatacctgtcagggagcctatgggattgaaggcctgggcgaagttcagacggcggacgctcgtttcctgggaccccatggagagaacgaaggggttgcaggtggtctccaaaatggagaggcctccggccagcacgaagatggccatcagatagatatcgaaactttgcccgatggcggcgggaatgtagcacagcgcgccgatcatgtagagccccagcccgatgaggacacccgccttataggaaaattcctccagaaggatggaggcgaaaatggcaagcaccgcataggccccatagaaggaaatctgaactccggcggattccgaagcattgatcatgaatattttgctaaatgccggaaccaggttgtccgtcatgttgttcaggaggccccacagcgcaaaacaggagaccagcatgaagaacggcagccggtactgtttgggaacgatcggcacggtagaggtacggttgttatccatattgcttttgtcaatttctcacaaggacggcggtgcgtcaatctggaaaccgaaaagagtccagaaattatccaacctgttgataaaaaaaataaaatgatgtttttccatggagatattccgtcagtgtccgcagaagctctttcttcttcttgacttgtgtttccgcggcggataggaatgaagagatgaagaagagtattctagccgtctgtctgggcctggccggattctggagcgttctggctgaagattctcccattgcggccccgggaagggtaaatgaacagggggatgcggaactgccttccggggaattgttgtcggatcatgtggcggaagcggaatttacgggaataattcatcggaaatgcaggttccttacttccctgtgcccggacaagtgcgaccatgccagggatttcgccgttttccggatcgtcaagtacctggattaccggaaaccaggcaagtacggcgatgaaaagcaggatcagctgatggttgacgttaatccggcgcacaagcccatcctgcagagtgcggatattttgaagaagatatccgcccttaaaccgggggacaaggtggttcttcactgggctcattattatatgcaccggaattccagttctttcccggaacgtcccgtgatttccgtggagccggcggctctttccggaggaaaaaagggaatgtaaggactggtctttcctcaggccgttcaagcggggctggacgcaacggaaagccgtgtgttaggaaacggaccggcaaataacgctgctccgggcaagattgccgcggggggcggcgtatatatcccgcgaaacacaccataaatacgatgcgtttatctttgaataaattaatggggcttggcctgttgtgcgcactgggcctgtctattccctccgttctcggcaaggaaagctttgagcaggccaggcgtggcaagtttacaacgctttccaccaaatacggccttatgtcctgccggaacggtgtggcggaaatcggaggagggggaaaatccggagaagcctccctgcggatgttcggcggacaggatgctgaattgaaactggacttgaaggatacgccttccagggaagtccggctttctgcctgggcggagcgatggaccgggcaggccccttttgaattttccattgtggccatagggccgaatggagaaaagaaaatttatgacggcaaggatatcaggacgggcgggtttcataccaggatagaagccagtgttcctgccggaacgcgttccctggtgttcaggcttacttctccggaaaacaagggaatgaagctggacgacctgtttcttgttccctgtattcccatgaaagtgaatccgcaggtggagatggcctcttccatttacccggtgatggtgcgtatcccgtgcagccccgttctttctctgaatgtccggacggacggctgccttaatcctcagttcctgacagctgtcaatctggattttacgggtacgacgaagctttccgacattgagtccgtggctgtaatacggggggaagaggcccctatcatccatcatggagaagagccgttcccgaaaaactcttcccaggttcttggtacagtaaagcttgccggttccgccagaccccagatttctgtgaaggggaaaatggagctggagcccggagacaattacctgtgggcttgcgtgacgatgaaagaaggagcctccctggacggcagggtggtggtgcgtccggccagcgttgtggcgggcaataaaccgatgagggttgccaatgcggctcccgtggcgcagcgcatcggcgtggccgtagtcaggcatggggatttcaaatcaaattcctaccgtattcccggtctggcccgttccaggaagggaaccctgctggccgtgtacgatatccggtacaaccattccggagaccttccggccaacattgatgtgggcgtaagccgctctacggacggaggccgcacctggtctgatgtcaaaatcgccattgatgattccaagattgacccctctctgggggctaccaggggcgtaggggatccggccattctggtggatgaaaagacggggcgcatctgggtggccgccatatggagccacaggcattccatctggggcagcaagtccggagacaattctccggaggcctgcggacagctggtgctggcctacagcgatgatgacggcctgacctggtccaggccgatcaatatcacggaacaaaccaagaacaaggattggcgcattttatttaatggacccggcaatggcatttgcatgaaagacggcacgctggtcttcgccgcccagtactgggacggcaaaggggtgccgtggtccaccattgtttattccaaagaccggggaaaaacctggcactgcggcacgggcgtcaaccagcagacgacggaagcccaggtgattgagctggaagacggctccgtcatgatcaacgcccggtgcaactggggcggttcccgcatcgtgggcgttacgaaagacctgggccaaacgtgggaaaaacaccccaccaaccgcactgcccagctgaaggaaccggtctgccagggcagcctgcttgccgtggacggcgttccgggcgcgggcagagtggttctgttttccaatcccaataccacatccggacgttcccacatgacgttgaaagcttctacgaatgatgccgggtcatggccggaagacaaatggcttctttatgatgcccgcaaaggctggggatattcctgcctggcgccggtagataagaaccatgtgggcgtgctgtacgaatcccagggggcgctgaacttcctgaaaattccctataaggatgttcttaacgcaaaaaatgcgcgttgattccgtttcccggtaacatgttcaacgggccgttttcgttggagaacggcccgttttttgtttccgggtgtttttgtgaaaggacttggccgctgcgctacgggttattttccgctaaagacgggaaactgtaccaggaaccggctccccaccctttggcgggaaagccggcggtgtgttcttaacttgttttgaggacgccattgtcaggataaaaaggaagcaagagcctccttcagcatgtttctggcgcggaacagcaggcttttggtagcgggaaccgtcatatccagcgcccgggctatttcctcatagggcatgttttcgaaacgacgcagttggacggccagccgcgccttttccggcagagcggcgattgccgcgtccacggcgtgctggagttccgtatgttccagtgcttcgtccggggcctgggaaggttccagaaacacggccatgcctccttcctcctccatggcgtctgcggaggtggtgggcttgcgcttctggcggcgcacttcattgaacaccagattgcgcaggatggtgaacatccaggtggtaaaccgtgcggaaggttcataattcccggctcccttccagatgcggatgaatacctgctgggcgatgtcctctgtctccggaccgttgttcagcatacgggccaccgtcgcatatacggaattctggtgtttgcggaccagcatttccatggcggaagcgtcgccattcctgaccctcagcatcagcttggcatcttcgtctggttccgcaggcggcatgtcttgtgcttcatccatgaaattcccttttataaaccccgtctccggtgaaaggttgcagccggcagggcgcattccggaaaaaggtctatcccatttttacacggctgactagatgaaaacgggtctttcttttctttccgcagggaatggaagtaaaatgttttactctttccaaagcccgggaaatattcgcgcctttgcaggagagaacccggtgcacgatggattccctccatgcccgccgatttgacaggggccggaaggggcttgtcagggcagggaagaatggaagaaaggaatatcggctaattaatttgtttaaggaatcattccgaatttcttttctcggcttcttcctggttcagttccaaatggggtattccctcagaagtttatgaagaaagcatgaaggaatgcatggagcggaaaacagggattcctcaatggtacgttattgtggacgggcagcggaatatcattgcgggaaccggagtaattgaaaacgatttttatgaccggaaggacttaactcccaatttatgtgctctttttgtagaggaaaggaaacgcggcaggggaatagccggggtggtgccggattttgtgaggaaggatttggcctctctcggatatccctggctcccaaccacactccgcgcggaaagaagagcaaggaatggagaaagttccccggcaaaagggaaagaggggaaaataatgaaaaaccgtccggtgtttccgttggaagatgcacggagccgcctgccgggggaggactctgttcttgacagcatttcctgtctgcctgataacttgataatacgagtacccctcagcagcatcaggaaacgccgccatgaaacaatgcatgaattccgaaaatttgcatcgccgcctcaagaagattatcggacaggtgcaggcaatcgacaggatgattgacgaagacgttccctgtgaagatgttcttgctcagctcaatgccgccaagtccgccttgcataaggtggggcaggtcgtactggaggggcacatcagccattgtgtccgggacggacttgaacacggagacccggaagagacgatcgcgcgcttcaccaaggcggttgagcggtttgccaacatgatttgaatgggacaaggggttaatgtctttttctggaaggttcgggaggggggctcatttttttcttgaaaaacctatacccctataggtatataaatgcccgtacccgtatgggtatgaaaagaaaaattatcatatgctggaccgattggaaaaattgctggaatggggagggacaaggcggaaagtcgcactgttgtccgtttccggattagctctgttgatgagcatgcttggcatggaacctttgccctttgaaatttcatggatagccattgtgctgtgcggcgttcccattgtgctggaagccgttcttggcctggcgacggcctgggatattaaggcggatgttcttgtttccgtcgctctggttgcctccgtcatcattggggaggacttcgctgcggcggaaattgcatttatcatgcagcttggggaactccttgaggagctgaccgtagcccgggcccggaagggtattgaaaagctggtccgtttgaccccggcgaccgcccggaaagtggaaggaaccagggaggaggttattccggcggaagaggttcgcatcggggatattctccgcgtattgcccggagagacgattccggcggacggcgttattctttccgggcacacttccgtcaaccagtccgtaatgacgggggaacctcttccgatagacaaggaaaccggggatgaggtttccagcgggacggtcaaccagttcggaacctttgacatgaaggcggccaggaccgggaaggacagttccatccagcgcatggtgcgcctcgtccaatccgcagatgcggggaaggctaaaatagtgaggctggcagaccgctgggccacctggatcgttgccatcgccctggtttccgcagggggggcctggatggccacgggcgaactgatccgcgccgttaccattctggtggtattctgtccctgcgcgcttgtgctggcaactcccacggcggtcatggccgctatcgggaacgccaccaggcatggcttcctggtgcgggaaggggatgccctggaacgcctgtcctgcgtgtcccacctcactttcgacaagacgggcacgcttacctgcggtgctccgcgcgtggcggccgtgcgcagtttcctgccggagctcccggaacaggaactttacagatatgccgcctgtgcggaactgcgttctgaacatcctctgggcaaggcgattgtccgctgttaccggaaagattcagtgcgggaacttccccaaccggaacaattccgcatgattcccggcaggggagtacgggctgtggcgcagggaaaggaacttctggccggcaacctggaattgttcagggaaaacggggtggagctgtccgatgaggccagacgtgcggcggaacggtatcaggaggaggggtgctccgtgattttcataggaatggaccggcaggccgcagggttgatcgccctgtcggataccttgcgggagaatgccgtagctaccatccgggaagtacgggatgccggagtggttcccgtattgctgaccggggaccatgggaatgccgccgcgcgtgtcgccggacaactggggattgacctggtttgcgcggaatgcctgccggaggacaaattcaactggattgacgcgtgccagaaggagcggaaccgtgtgtgcatggttggggacggaatcaatgatgcccttgccttgaaaacctctcatgcgggaattgccatgggcggcataggaagtgacattgccgtggatgccgcagatattgtcctggtcaatgacgatatccgggaactgccccatctgctccgtctgtcaaggcgcatgatggggacaatcaaatgcaatctgacattctccatggccctgaacttcatcgccatcatcctggcggcgggcggcatcctgaatcccgtggctggagcgctggttcacaatgcgggatccgtcgtcgtgatcgccaactccgtttttctgctgaaatggaggaggaaaaacgcgtgaatccgcctggagggtagagaaacttccccgtgttgattgccgggagggaacggagtccgtctttttgacgctccggtttcaccgcgccgggctggaaaacgcttggatgaagagaaagtccgtgttattctttttccagttcggcaggggtgcccaaataaaggctgagattgcaggaacggcatgctgttcccgcagaacccttcaaacctgatgcgaataattccgccgcagggagttcgattgaacgggcttgtcctgtttttcggggaggtttcgtttccgctgttcccctgccggaacagaacagcattcatcccatgaacgatacctccaatttgtcttatcccggttcccgccgcatttatgttccgggccgtctgtacccggatgttcgggttcccatgagggaaatcattttgggcgataccttgttgcccgacggcaccgcccaccctaatgacccggtgcgcgtgtacgattgctccggcccctggggggacgctgcttatgagggaactgcggaggaggggcttccctccctgcgtgccgcctggatacgggcccgcggggatgtgaaagaggatgtggggcacgagcgcaccctgcgtgctgcgggcaagacgcctgtgacacagcgttattacgcccaacagggcgtcattacgccggaaatggaatttgtcgccatccgggaaaatctgggcagggaacaggctttcaaggcgatatacgaccgctatccgaatgccaagagccgcccggacgaagctgcggaagccctggaaacgctcaccatgatgccgcgtccgtccgaattggaggcgcaggagggatttgggccgtccagcatggtggcccgcgaccgcctggattaccagcatgccccggaacgccggaacggctgccgcatgcctgcctactttacgccggaattcgtcagggatgaaattgcctccggccgtgcgctgattcccgccaacatcaatcatccggaatgtgagccgatggctatcggccgcaatttcctggtaaaaatcaacgccaacataggcaactccgcgctggggtccagcattgaggaggaggtggaaaagctgcgctgggccattcactggggggcggataccgttatggacctgtccaccgggaagaatatccacgcgacgagggaatggattttaagaaactcccctgtccccatcggtactgttcccatttaccaggctctggaaaaggtgggaggaaaggtggctgacctgagttgggaggtttttcgcgataccctgcttgaacaggcccgccagggcgtggactatgtgacggtgcacgccgcccttctgctcaggttcgtgaaccatacggcgcggcgcatgacgggcatcgtttcccgcggcggttccatcatggcgcagtggagcatgatccacgaacaggaaaatttcctttattcccattgggatgaaatttgttccattctggcggcttacgatattgccgtctccatcggggatggcctgcggcccggttccgtggcggacgccaacgacttcgcccagctggcggagctggaagtgcagggggatttgaccatgcgcgcgtggaaagcgggcgtgcaggtcatgaatgaaggccccggccacgttcccatgcaccttattagggagaacatgagcaagcagctggaatggtgcatggaagcgcccttttacacgctggggccgctggtaacggacatcgcccccggttacgaccatattaccggagctatcggaggggcgattatcggccagcttggctgcgccatgctttgctatgtaaccagaaaagagcatctggggcttcctgaccgggaggatgtgagggaaggcgtggttacctacaagctggcggcccacgccgcagacctggcgaaggggcatccatccgcgcaatggagggataatgctctggcccaggccaggtttgaattccgctgggaggatcagttcaacctttccctggatccgcaaaaggcccgttccttccatgacctgacgcttccccatgccaacgccaaaaaagcccatttctgttccatgtgcggtccggacttctgcgccatgcgcctgagccaggatatccgccgccgctcacagcaataggcgtcttttctccggcatttcgcggggcttgcggttccgagggggccagcccttaaaaaagaatgacaagccccggtatcctgctatagtacggttaagatgagaaattcattttttcctgcaattggtgttctttccttggcctccgctttgatttgttccgcgtcttcctcctgggagactgattggaataaagcgctggagaaggccggaaagggcggacatcctgtgctggctgattttaccggttccgactggtgtcccggatgcatttacctgcgcaaaaatatttttgacacggatgcgttcgccaaatatgcggcggatcatcaattcgtgctgctggaactggatttccccaaggctgccgggaaaatgccgccggaacagttaaaattccatgaagagctgatgcggcgttatggcgtttcctcgttcccatccgttctgttgatggaaggaaatggcgctccctacgctaaaatagtgggtgccaccagaactccggaggaatatctgaaaaaactggaggctgccggagaaacgaggaggaagttgaaagaggccgtagcggcggcccagccattgaaaggaaaggaaaaactggagcaactggttaaggccttgaacgtgcttccggaagatttgcagcctttccagaaggggttgattgcagaaatttccgctctggacccggaggacaaatacggttttgcaaagaagtctgaaaaagccgcagccatggagaagcagcggcttgtgtgggaacagttctgccaaaaatattcggggaggctctccgcagaagaaacgcgcgccggccgggaggaagcattgcagatgttggaaaaaaaggatacgcttcctcccatccgcctgaagatcgccaaatatatcagtgatgggtataccttggaacgtaatttgcccaaggctttggaatacctggaaattgcccgtgatgccgatccggagtctcaagccgccaaaaaactggaaccgtggattgacaatatgcggaaacatatcaatcaggagaagtaaaaattgttccgaaaggcatggccgtcttccgtcgaagggggagggccatgcctttccgttttttattttaaacaaaaaaacagggctgttgcgctatggctgatgaaggaaccgaatgtacggatgcagaaatgaatacgccggcttacgtcaggaatgaggaggttgatgaagaaagcagtcatttgctgagttgggatgagtggctgcgggaacatgcttcccagctgcttctgtttgcacgccagcagtcccgctcaccggaagatgcggaggatatacttcaggatgccctggtacgtttggctcgcaaggaggcttccggggaatttgtgggagggcaggaggcgtggctttcctatgtctttgcctccatccggcgtctggcggtggattatggccgcaaatccgaccgccgccagaaaagggaggatgaagcctgcgcctctgaacgggacgaagatgtttatatggacccctggttttccagtgctgcggcagatgaggaactcaaacagttcatggaaatgcagctcaggaagctcccttccaaattctccgaggtcattgtcttgaaaatatggggggaacaaacttttcagcaaattgcggaaacgctggaaatctcacagaatacggcggcgagccggtaccgttacggtattgacttgctccgcagggctttgagaaataaaaagaatcaattctaatggcgctctacccttatgaaccatgaaacaacatcatccgccgcaggggaggaagacggcggtactgccgtcctgcagccccttcccgtatctgatgaactgatttcccggctggccggaaagtgtgaggaaatcttccctttggagagccgtttccggcgtgatgaaatctccgatgatgaaattcatgagatggaatcccttttgaaacattttcggccctctccggcaaaagtcctgttcagggaacaatgctgtgccctgatgtgtgcggaatccgaacatgagatggaaacccggttgaaaaggctttccgcttcttccatgttggaattttccgtctgtaaaatggcgcaagccatgaattgcgccagtaatgaaaaacgggaaaaagcgctgaacatccccctgtggcggcgttttgcctgtatttccggcatttccgcggctgccgttgtggggggcgtcatgctggttcaacatgctctggtggcgcccgtagggacggtggcgaccggaaatgccggggaagttccctcggaaaaggctgaaactcctgtgattcccggtgaaaagcgggagttgctccggacgcccaccctttttgaattgcagggaggggatgagcgcgtgcctgtgattgctcccgccgttatccgcaaaattcttcctgaaaaggaatattaaaaattgcggtgcatgaatatcgccggaattgtgcgatctgctgcggcattgcggctttccttggcaggcaggaaagatgcctggcgttttccggtgttctgcggcgaaggatgccgtcccggaagcggcgaaaaaaatgcacaaattttgaacattgtatggacagatgctgtatattatctcacatggatatgaaaacctgtatctttctgacattgggattgctggtaggttcgggctccggatattccattgaccggcccgcaggaagtacggacaaccttcagccgcctcctctgacgccgtacgcgcatcaggtgaagccgctcccctcttccaaaccggccagactgggaattgttccgggcacggtgccccaagcgctcgttgcgcagctggagcttagcggattccccggagtgctggtgaccaaagtgatgccggacagccccgccgccaaggccgggctccaggaaaatgacgtcatggtcaagctgggggatgtctccctgtccggtccgcagtctgtgacggaagccctgtctgaaaaggtgcctggagataggattacggctgtattttaccggaaaggaaagagggagactgttgaaattaccttggatgggggaacgctttccgctgaagaaatactggcggcccagggggatccccgcacgcagccccgcgcagttccttccgtccggcgtcagacggcgcctttttccggaatggctgcacggcctaatctctcccagcgtattctggatatgcagcagatgatggatgagtttttgaaggattccgccatggatgattaccggatggacgacatcatcggccggatgaacctgactcccggcgcggcgcaaatgctccggagcttgcagggacttcatcaaatgcccatgcctcccatgggcaaggtttccggagggggccagagcatgtcttccgtccggatgtcggatgccaacgggactatcgtggtttcttccaattcccggacgggaaccacagttcatgtgacggactctgcgggaaaggttctgtattccggcccctacaatacgcaggaggaaaaagccgccgtgccggaagccgtcagggaacgcttgaaaaacatagaaaccaatttctgcttttaacggcttcatggaatagcggagaaatccgtattcatgaagttgacgacagctgccccgtgcggggcagctttttttattacgtggaagaggaggggaaatctgtgttgatgcggcagatgaaaataatgacgggcagaatgaaaggaaaatcatggaaatgcgtatccttcaacaaaatagaccgcttcatggttaagtgcaggtgttgggaaaacggcggttttttcagtctgcccggtttctggcggcggtcttttcacaaagaacgacatgaatggttttatttttattttgtggatgctttgctgcgcttcttggagcctgggagcggatatatttgtttctcctgacggagatgacgctcatgcggggacggaagaatttccgatacgttccgtggaggccgctgtgcggaaggccgggcaagggcattacggaaaaggctgccagattatcctggacgacggtatttatcacctggcggaaccgctgctcctgcgtccggttcattccggtctgactattcgtgccaaaaatccgcataaggcggtattgagcggtgctcagccctttgttgcggactggaagcccttccgtgatgggatcatgaaaacttccgtaccctccggactggaaatggacgtattattggtcaacggcaaacccatgcacatggccaggtatcccaacgcaactcccggagaacgcattttccagggaacggccccggacgcggacgctccggaacgggtagcccgctggaaaaatccggcgggtgcgtatctgcatgcccttcatcatcgcatgtggggagacatgcacttccgcattacggggaagaatggaaatacactggtcaagcaggggggctggcagaataaccgtccctctccgccgcacgaaaaatataaatttgtagagaatgtttttgaggaactggatgctcccggagaatggtatctggacagaaaggaacatatcctttacctgtatccggaacagggaacggacctggctgcagccagactggaagccggcggcctggaagaactggtcaaaatccagggggaaggctcatcccccgtcaggaacgtgacactccgggatctggtgctgactggaacgcggcgaaccttcatggaaaaccgggagcccctgctgagaagtgactggaccattttcagaagcggagccgtactcttgcggggaacggaggggtgccgcattctctcctgcgaatttgccaggtttggtggaacagccgtttttgtggacgggaataatgaaaatcttctggtgcggtcctgttatatccatgacataggttccaacggcgtagcgtttgtaggggaccgttcctgctaccggggaccgaagaattatcgggaagccaaaggaatgtccttggagagaatcgacagggttccgggacctcgaaacaatgaatttcccaggaactgcatggtggatgattgcctgattacccggacggggctggtggaaaagcagactgccggagtgcagatatccctggcccgggaaattaccgtcagaaattgttccatctacgaacttccccgggcgggtatcaacataggagagagggctttcggcggccatgtgattgaatacaatgacgtttttgataccgtcagggaaaccagcgaccatggttcgttcaactcctggggacgggacagattttgggtacgggaccagatggcgctgagccaggacaaggatgtcgtcctgctggatatccggcagcctaatatcatcaggaacaaccgctggtgctgcgatcacggatgggatgtggacctggacgacggttcttccaactacattatttgcaacaacctcatgctttcctccggcctgaagctccgggaggggttttaccgcaaggtttacaacaatattatggttaacaaaaccctgtacccgcatgtatggttcaggaacagcggggacgaattttacaataacattatttttgaagaccgttaccgtcccgccggcaacatggatttttccccgtggggaaaactgatggacaggaactttgtgcatgtgaagggcatgaaaggggtggaacccgcctccgaactggccaggcaatccggcaatgacaggcactccctgaagggggatgccctgttctctgctcccggtttgggggatttttccgtccgggcttcttcccccgcccttaaactgggatttcgcaattttcccatggaccgtttcggcgtgcgttcccggcatctgaaagccctggcgcgaactccggatattcctgaagttgccgggaacaggatggagaaacgggaaacggtgctggtgaagaaactgggggcggaagtgaggatagcggagggcgaaggggatttgtctgtctttgggctgatgccggaggatctgggccgggcgctggttattgtcaaggtacagaaggacggcccttgttcctctgccggcattctgcccggcgacgttcttctgatggcgggcgggaataaggtggatggagtggaaaagctcgaacgcctgctgccgtcttctggtaaattaaccgtaaccgtcaggagaaaccaggaaaatagaaaggcggatttgcagttttgaggatgcttctggcctccggaaaaagaggaagcggaaattacagaatcccggtcaacttccggtaagtctccagggcaaaagaatccgtcattccggaaatataatcaagcatgtgcgccaggcgtgcagccttcccgccgttgttccggggtacgccggtgccctgaagcatgatggcgattttttgggattggccggaggatggatgattcacccattccataaagaagtcgatcaattctcccagtaccttataacccatagcttccacttcaataacctccctggcctggtacacattcttgatggcgtactggtacaagccgttcagcggggcggccagttccgagctgtctatcagggattgttccaaccttccttgcagcaggtcttcctcgtggttcacgaaactgtccacggcggactgaatgcttttgccgatggcgagcgcgcgcatataatggatgcaggaatctttttcctcttttgcttccagttcccggacataacagagctgggattccgtcaggaaagggctgaacaaatccctggtggaagcaaaatccagaagtccggaaaaatacccgtcctcaatatccgcaatgcggtaacagatatcatccgcggcttccatcaaatacgccaggggatggcggctccagcaaagatgtgctgcatcaggtgtggaacgcggaatcaaccccagatgtccagccatgaaagaagcagcttccctttcctgttccccgatgccgaatttcttgcattcaagcttgttggccgcaactatgctgcctttcctgacggcggaggaataagattgcgtacagggatatttcataaaggcgcccaaaacagccgccgtcagtttcaggccgttgccctccatcggatctcctgtacgtgtcaggatgcggaatccctgggcattcccttcaaaaggcagttccaggccgtgccgtttcagggcagtttcaatggcgtcttcaccggaatggccgaagggcggattgccgatgtcatgggccaggcaggcggtggaaacaatggtagcgacatcggaaggcatgataggagcgggcagggaccctttcttcgccagccactcccctgccagcatgccgagggaagaaccgatgtgggctacctccaggctatgcgtcaggcgtgtgcgcacgtaatcattgcggcccaggggaaaaacctgtgttttgtcctgaaggcggcggaaagcactggaaaacagaatgcggccgtaatcccggtcataattgctgcggtttttctgtggagacgccgtaccccgatgcctggatccccagcgcgcgtccgacaaaagctgctgccaattcatcatccctgacatggtaaggaaatgctacaggggaatgcccggatgtaacaggagaaaaatagagagggagttcaataggtcagcatcagccccacgccccagtgcaggttcttgtcgtaattggtggaaacgctgaggtgtgaggtcaggatgtagtgcaggcccacggaataatcccggtccgtattcagggaaaaggaaaggcgcaggcgggaggtgagcgggatatcgtccctctccaattgcaggcgcacctttccgtccgtgtcaatgcgcgcatccgcaatcaggagcaggggcagcgtgtaccgggcgcccagggtgccatccatttcccggtcctttttggtggtctgtcggaacatgttgcgttctccggcctcccccttgcggcaagtccagtccgccccgatgtaggggtaaagccattgcttctccccgatatacctgcccagcctcccttccgcctcataaccccgcgtatccttgtagcctattttccactctccctgcatgctccaccgggtacccccgaatcccaggttccctatgttcccgttggtggcgaaatcattgttcacgctcaggtaccatttccggtccatgtcgtaaacatgctgaagtgcctgcatggggtggggaagctgaggattggggggagaatcctcatacgtaaaaatccggcccatgccgctcatcatgtggtacaggatatggcagtggaaaaaccagttgccgcgcgttttctccgcagcgttaaactcaatcacctgggtgtccatgggctggatatccgctgtaaacttgagcggagaaaaatccccatgcctgttcaccagccggaaaaaatgcccgtgcagatgcatgggatgcctcatcatggtattgttggtcaggattatgcgtacattctgtccttccctgatcatgatccggtccgtctcggaaagagttttcccgttaatgctccatacgtaacggttcatattaccggtcagcatgaaatgcaattccttaacgggcacgccggaaggaaaagtggtgcgggaaggggacttcagcatgtcatacgtcagggtggttccttctccgtcctcctgcatgttgccgtgtcctcccccatgggaggaaccggacttcatgtccattatctccatatttccggaatgggcggttggcatgccgtgatgatgcatcttcatatttcctcccatggtcatcatcccgttcatttgcttcatctttttgaagtaattcagcttgggaaaggggcgcaaaggctgcctttccccatggcccagccacagggaggaagacccggaagtatcctctgccgtcgcctggaactcaaaggccttgcctgattccggcacttccaagatgacgtcgtaagtttcggaaactgcgattatcatgcggtccacgtcaacgggaacaacgtctttcccgtcgctggccaccacgcgtattttcccgcccgcatacctcagccagaaataggtggaggatgctccgttgacgatgcgcagcctgatgcggtcgccgcccctcagccggggcagggaagcccgcgggatgccattgagcagaaaacattcataatacacgtcactcacatccatggcgttcatgcgcttccattcgcttaacagcttggttgccatgcagccggagcgcagggcctcccaatagctctgtacactccccttgcggatggaaaaccagtcggagcccgtgtgaagcattctgttcacctcctggggattctcgttcgtccagtcgctcagtaccagcgtatattccggcagggcgtcctccgtcctgcgtgccgggtcatcgggccgtttgcggacgatgaacgctccgtacaggccgctctgctcctgaaaaccgctgtgggaatggtaccagtacgtgccgttctggatgatgggaaaagtataggtatgcgtagtgtggggcttgacaggagcggaagtcaggtacggaactccatcctggtcattgggcaccagcaagccgtgccaatggaaggaagtctccgtgtccatcaggttatgcacccgtattaccgcagtatctccctctgtaaaatgcaatgtggggccgggaatgctcccattgatggtcatggcctggcgcgtgactccggtaaaattgacgggagcgttccggacatataaatcgtattctaccgtttttgccagagaaggggagaagagtatcggcaagcagcacaggaatggaagaaaatggaaggttcgtgtgaacatgaatgggaaaaagcactgccaggaaagacctgcctcttgaatttccagttcaaaatgaaacggatgtgatgtgtcatgcccacccttggccaaatctgctaaatggcggggcctccaattcggacggaatagggcgtctggaatttattttatgcgtcgttttttaaggaaatagggacgatcaggaaagaggccaggataagcaggcagccgatggacagaaggaacatgttggaatgctccctgaacaggagcagggaagtcatagccgccaggggaatcttgagattgttcataatcgccagctttacgggagttacccggcgcgcgccgtaattccacaggaaaaaacagactcctgaagcgatgacgcccaaataggccagcagccaccattgcacggttgaaatcccctgccagcaggccagtcctgacggcaggccggaaggcaaagtaaccagcagggcgcctgcataggcataggcgaagcaggatgcttcgcttctcccgaaccaggaatttttcagggaaatgtaggctatctgacctgccgcgaagcagaggttggaaagctggaccagaacgattcctgtcaactccccgttaccggaggaatatcctttccaaaggattcccgctcctcccatggctgcaagaatagccgccgccagatggagcggcggaagattctttttcatcaggccgtcaatcagaaccacataaatcggcgtggtggctgtaaaaagggcaacctggtgggaaggcagatagtggaaggcagcgatatagaaaagatacatccctccgaactggacggcgcctatccccatcatccccacggcatggctgaggggcgccttccggacgaaggggagaaaaacggcaaatgaaccggccatgcgtgccagtgcgacaaagctggcgggaagtccggacaggcaatttcccagcagtccgaatgacaacgcccaaatgaaagacgtgagcagcaacgcaggcatgtgggcggaagcatacggagagaggaaaaccaagtcaatgcccacggcgcagagcatatagtcgggaacatgcaaaattacccaaaaaacggggtaagataatggttctaaacataaaaacaccccgaaatattgaattccggggtgttcaggaaaatggtacgcggtactggtttcgaaccagtgaccccatgcgtgtgaagcatgtgctctaccactgagctaaccgcgcgtttgcagtgcggaaggaatatatcgttcgtgccggggattggcaaggagttttttgaaatcgggtaaaaaaggatttcgcttttccgccgtcaacaagttcccggaggaatgaccggtgtacagtttctccgagggacggtttggaaaagtggaaaggtggcttaattccggcttgtacagcatcaaccgtcttcctacactccgggcatgagttgcacaagccctcccagagcatgggcccagattgataccaatgcgttgaggcacaatttaaacgtcgtccggcgcgtcatgccggatcaccgtctgatggctattgtgaaggcggaggcttatggccacggtctggaaggggtggtgaaggccctggatggcgaagattgcgcttttttcggtgttgccacggtggcggaggccggccgggtgagggatgccggggcaaaaacatgcccgtttattctcggtccctgttttgagggagagcgggaggaaatcgtgcagaacggctggcgcgccgctctttccagcatggaagaggcggagcatttcaattccctgggcgccctttatggcaaaaccgtccatgtccatttgggcgtggataccggcatggggcgcagcggttttttaccgagtgaattgcacggcctgacggacaaactcaaacagttcagttatctggatctggagggcgtgttttcccatttatccgcagcttccgatgatatttccttcacccacggacagatcagcggctttacggaagccgtaaatgaactttcccaaggccatcgatacaagttccggcacctgtgcagcagcgccgctgtgtttaattacaaggttccctgcgccaatatggcgaggctgggcagaatcctgtacgggtattcccccatgccgtctccctataataaggaactgcggcctacaatgaccctgtacagccgcattactctgatacgcacgctgccgggaaatcacggcgtttcctacaaccactgctatataacgaaggggagcacgaaggtggccactatcggcatcggttatgcggacggctatcttcaatatctgtccaaccagggagcgagggtgtatatcaatggccagtactgtccggttttgggccgtgtgacgatggaccagatcatggtggacgttacttacatggaccatgtggagaccggagacctggtggaaatcatggggcctaatgtaagctgggaggaactgacgcgccgtgccaataccatccccagcaatgtgctgaccagcatcagcgcccgcgtgccccggatttacgtgtaggatgatgccaggggcatggtgattaaaagctgttgcccgccgcccggaaaaaaatcaggggatttatttgcagatatgtttttccccggcggacacggataaacgttttaccgtaccttttaccgctggcggattctattccagtcttccggctccagagcgcagggatcaggggctacccagtggcccggttctatttccacaggggtaaggtccgctcccaccgtctccggataggaggggtgctggatgcggtggccgaaagcagagccgagcggcgggttgatgggagaggggacgtctcccggcagaggctggtgcttgttggccctggaggggtctggttccggaatagcgtccagaagagctttggtgtaagcatgtttgggggattgatagatggtttccgcatctgacatttccacgattttacccagatacatgaccgccacgcggtcggagatgtgtttgacgaccgccagatcatgggcaataaacaggtaagagagtttgcgttcctcctgaagttccagcagcaggttgagcacctgggactggacggatacgtcaagggcggagacgggttcgtccagaataatgaggctgggatttaacgtcagggcgcgggcgatgccgatgcgctggcgctgcccgcctgagaattcaaaggggaagcggtcaatagcgctgtccggcaaccctacgcggtccagcaggccgcgcacccattcccggcgcgcggcgggggtgcccatgcggtggatgacgaagggttccgctacgatttgaccgatggattgcctctggttgagggattccgcagggtcctggaagaccatctggatgtgcggacgcagaggcctcattttgcgctgggagagtctggcgatattgttgccgttgaaccggatggagcccccggtgggtttcagcaggcggacaatgcttttgccaatggttgattttccgcagccggattcccccaccaggcccagcgtttcccccgggtaaatattgaaggaaacgtcgtccacagccttgacccatcccgcttgccgcaggaaaatcccggagcggacggggaagtacattttcaaattgtctacttgcaagagaggttccggcatggctggtagaaaaagaagttaaaggttggcgcaacgggggcaggcttccacgaagtggtccggggatatttccacgaggggagggcgttccgtgagttcttccgcgggtacgccctgcctttggcagaagcggcatccgggaacgaaatccgcaatagaggccacctgaccgggaatggtgggcagtttggttttccgcacggaacttagctgagggatggaggccagcagtcccctggtgtaagcatggcgggggttggcaaaaagttcccggacaggggccttttccaccacgcggccagcgtacatgacgactacggagtcacagctctgtgcgatgacgcccaggtcatgtgtaatgaggatggaggatgaccccatttccgcctgaaggtctttgagcagggacaggatttgagcctgaacggtgacatccagggccgtagtaggttcatccgcaatgatgagttccggatggcaggccagggcaatggctatgacgacgcgctggcgcatgccgccggagagctgatgaggaaattcgtccacacgctgttccggggcggggatacgaacgcgctgcaggagttggatggctgcgtcccgggcttccctggtgttcattccccggtggagcatcagggattccccaatttgcctgccgatgctgtgtacgggattgagcgccgtcattggttcctggaaaatgacgccgatatggcggccgcggatgccgtgcatgtccgtctcttttgcctgaaccaggtcgcggtccttgaacagaatttgcccgttcagaatttttccccatgggctggggcagcagccggacgatggacatggccgtaacgcttttgccgcagcctgattcccctacgatgcctacgcaggtacctttggggacggtgaagctgacgccgtccaccgctttcaacaggccggattccgtttcgaagccggtgaccaggttcttgatttccaacaggggatcgctcatgtgttatttttccgtggcagaaggttccagagggtcgccgctttccgggatgacaggcacagacggcagcttgccgccgccatccttgttatccaggctttcaatggagtccatgtagcgatactggtcatacacggtatccacttcctcgaatgtttttccttcccgcttggcttccattgtttcctttttgatatcgttatccacccagtacagataactttccatgggatcaaatacgacgggatggcagaattgcgtagttgcactgttcggccatttgacccagcgccagtaacccagtctgatgaattccgtggtccagcagggaacccacagggcttcgtcatcaattttctgctgcactttccacgtggccttttggagttcgtcttccgtggctgcgtttgtttctgcgtccagcagcttgtccatttctttgtccgcgtaagcgcagatgttattggtataggtaataaggcctccacgctcatcataggcgtaccgggagtggaacccctgctcgttcatcggatgggggggagtgaatccccaggccatgaaggaggcctgagcgcgtttttccatgattttgcggaaagctacggtggagtccagagggtcaagctggatttccaggccgcacttgcgcgcgtcttccttcagcttgcccagagtggaagccagggaaggagatgaattggggaaggtgatggctgcggtgagccgggttccgtccggcttgcggaggatgccgtccgggcaggggatggtgtagcccgccctggcgaaataagctcgggcctgttccggggaataggggcgcgccttgatatagggattggtgaatttgccgaaacctgaattgtaggaattgagccgctggtagtctccgcggaaggtaatgtcaatgatattctggatattaagtgcgtgctggaacccccggcgaacattgaggtcattgaagggggctttggaggtattcagaaaaactccgtaaggagggcgggggtaaatggtgtaaaatgtgctgcggttgatgtagccgttgtgaacctccggtatttccatgcgttcgtgccatagttccggtttggtgatgttcaaaacgtccagttctccaatgcggaagagttcgatggccttggatggttccgcaatgaaattgtacacgatttgatccacattatacatgtatttcgtgaattttttgtccctggcccaccagtccggcacgcgctggagcgttacctggcggccgcggatgataccgtccggcttgacaacgtaagcgcccgtagtgggcggtatgcgccactggtagcgttccacgtagttggggccgaactcgcaataaaaatgcggcggggacggaatgaacagcgtgcaatagtacgggagcagaggtttggcgaaggggagtgtgatggaaaagcggctgtcgtcgtagatggtgatgttggaagcgttctggtaaaaaaagttgttgtagaatacgtcccggctgtattccgaagtgcggatgtacatgttcaccaggaggtcgatggcctttaccttggctccgtccgtatagcgggcatccggatccaattcgaagtaaacagtgcgcctgtctggggattccgcccatttatgagcgattcctggaatgatttttcccgtaaccggatggatggaaacgaggccgatgatgatttcatcatacaggggaccgcggaaaccgctgttgctgttcgggccgttgggccggaatgtgtcgggataggagccgggggcccactggcgcagcacgcctccttttttggcattcgggtcccctatctccggattgtccagtccatcctcccacttcaggtcttgggggatgtccgccggggtcttgaatttgatgtagtcgccttccgtctgcctgcggtgaatgacggacagggcggcttcatccgcaatgagtttgctttgcagtttttccctgactttagaatcttcctctttaaaaaacttgtcccggagctcccgtatttccttttgcttggcagcttcctcacgagccaggcggtcattgatctgtttgttccatcgttccgggaaggaatcaaatcccggagggagcgtgccgaagggtacgttcggctgccagcctaccccctgggattgggaggaatccttgcaaccggacccggctgtcagcagaagggacagcatcacggaagaaagggtggaacggaggagggtggacagcttaagcataagaaatggcaaagcgggagtctttttatttataagtggtgaattttttagggtcaaaggcttcgcggacagcctccccgataaaggtgacgagcaggagggtaatcaccagggcggaaaaggcggaggtaaccacccagctggcggaaagatccgccagtccgtcattgagaaggcgcccccagctggcgtatgtgtcaggaaggccgaagcccagatagtccagggaagccagagccagaatgagggcggaaacgctgaacggaaccagagtgaccagaatggcgaccaggttgggcaggatatgaacgaagagaatacggctggtggaagccccaagcacgcgggcggccgccacgtagtcgcgcgctttttccttcatggtggaggttctgagctggtaggtcatggacatccacccgaacatgattagaaggctgataatcaggaacatgcccttcatatgaaggggaaccatatctgaaataatcatgatgatgaaaaggaagggaacctgggagaagatttcaatgaggcgctgcatgccgaggtcaaacatgccgccgaagtatcccatcatcattccaaaggtgatgccgatgaaatatacgataggcaggtagaagagtgcggctttcatatttacctggaggccgccgtacagataagccagaatgtccgccccctgggtattggtgccaagcaggtggccccccttgaggggcggggaggggtggtagaagatacggctgattttatgttcatccgtctgtttcaggaattcctctttggtgccggggccgctgtaatgttccgccacaatgttgttgttttcatacgtggcgctgtacacctccgttctgtcttccagccagccggtggcccggtccacttttttccccttgcggaatttgtagctgatgtggggaagggcttcttcatccttatgcaaacgggaggccaaaccggaatacggcttgccgccggcctcgcagacgaggccgtcttcattcaccatcaaagcttccgaaccggggttggtggaatctcccgtgggatcgtatggaaccagaggcatgatgacaagggagggttttcccggctggcctgcctgttttttcagttcgcggtagttggcttccgcatccgcaaaatctccggtctggccaaatgtagaacccttgtatactttgcgcatcatggccggaaagtaccaggatccgtcctgaacgacaaggagggcccgcttgcccaccaggcactggtccatacaggccaatagcgtcaatacaagcaaaatgaggagggatacgtagccgcgggagatgcttttaaaacgctggatgcggcgcctggtgatcggcgttggatggaacctccgggggcctttcagcatgagccagaacccgaggcctcccatgaccagcacgcaaacccagccgaaccacaggaatttcccctgaggtgtcagaaggccgccgttgttctggtccgtacagacgatgttgagcatgctcatttcccgtgagacggtgaagggccagcttaacgtgggcaggagcagcccgcacagctctcccacggcagtaagaaccgccagaatgaccaaaaggtatgccagttttctaaccatgtgtattattcaaatttgatgcgcggatccacagcggccacgatgatatcggagagaaggttgcccagtaccatcaggaaggaggtaagcagcagcgttcccatgatcagggcgtaatccttgtccatcagagcctggtaactcagcatcccgaacccctggatatcgaaaactttttccaccagcatggagccggccacaatcaggctgatgaggctgcccagagtggaggcaatgggtataaaggagttgcggaaggcatgcttgatgacggcccctctgaaactcacgcccttggccatggctgtcctgatgtagtccgcggaaagattgtccatcaggttgtttttcatcatcatggtggtgatggcaaaggaacttactacataacaaatcagggggagcaccgtatggtgcagcaggtctccggcctgttgccagaaccccatgtccgcaaagtccggagacgtaagcccgcagagagggaaccattccagccgcgcgcccagatacaccaccagtacggcgcccagggcgaacccaggtacggagtaccccaggaaaatcaggacggaagagatgttgtccaccaggcttttatggcggattgcctttactaccccaaggggaatgcagacggaataggtaataatggcgctcaggatgccgaagtacagggaaacgggaatgcgctccttgatcatgtcccatacgggttcattgtacttaaacgaattgcccatagttccctggagcagcccgtcaaagctggtcttgtacattacggcacgccaggcatagccccgagccttgtcgcggacggcctccgtattatccgtctgcctcatgcggcgcgcccagcgttccgcgcggtccatgggggattctatatccacgctccagccttctgaagcggctttccgggacggcgtgccggaaaagaaagcatctttcacgctgccggaatccttgtcctggcgaactacgacgacctgttctcctgtttcattcagattgatccgtgtatgcgtatcggaaatgccggaatattcatcttccttgtctccctctcccgctccaccgatttccccgaattcctcacgggaaatgaaaatctttttgggcagcacgcccagccattgtagataagccgtgatgatgggctcctgcaggctgtactgctcttccagccgctccatatccgcttcactcaggttattgtcgccgcgctgggagccggctttctgtccggacagggcgctcatgctttgctgctgcatcatctgctcaatgggacctcccggaacaaaacgggttatgcaaaagacgagaaacgtaacccccaggagcgtcaagggcatgagaaggagtcgtctgatgatataggtcttcattcgtcgcgctgaactctaccgatttgtggaaggtgaggcaagtagcaatgcaaatttgtaagcctttgctaacataaggcgctgtccggttcttcttaagatgaaagggaaacaatgcaatacggcaggtttcctttcttttggcaggcctttcgggaggtgcggaatttacattccttctcccagccggcgcgccagcatgtccggaagaccggcggccagaatgcgtctttgggcctccgctacatcgtattccacgcggcgctggtagtacaccatgctgtcttcgtcaagcacgccgtaggcggcgcggggatcgccgtctctgggctggcctacggagcccacattaatcagatatttgttggttttgagtagctggatatccccggattcatattcatggatgcttccttcatggcggatgaatgtacgggggacgtgagtgtgtccgttaaagcacaggaattgattgtcacgcagcatattaatgctgtgggtggccgtatccacattcgtgacgtaggcccaggagttgggcttgtcctgtgtagcgtgcaccagaacgatttcattggggagaatgcgctggaaaggagcgcggcgaagccactttttctgttcttcggaaagttgctgccgcgtccacatcagggcattgtaagctactgggttcatccctgccggattgtcttctccaatggcttcctcatcatggttgccgcgcacggtgggaatctggcggctgcggatgaattcaaggcattcggacggattggcgttatagcccacaacatcgcccaggcagtaaacggcattgcattgaagctgttctatatccttcatcaccgcttccagagcgggcagattggcatggatgtcactaatcagggctattctactcatggtattgtaagcaaagagcatagcactttggggaggttttgccaagcgcgtttgctcacaggaaatcatggttggggcacagggtgccggccttcccatgaccccttatttccgtctgtttgatttactcgtcttttgccgaaggcaaggattccagggcttctctcagcccgtctactggatatttcagggaattggccagatggctggtcatcaggtcacgggcgatttcatccgtgggaaacagttcccggaaggggatgcgttccttttccggtatgttcagcctgttttccagaacaaaaatattactcaccaggctgggtgtcctgttgcggggatccttgaataactcccggcccagttccagagcttctctggatttggaaggcacacggacgagcgcataaaattctttgcgggccgtaaggggaggcgctcccaaatcccgtgccttgcggtaggcttccgccgccttttcaaagtccggttgccggtaggtatcgctatacatgttgcccagcagggattgaaggtaccagctgtcaggattggcgttgatgcctttttccaggaagcggcgccccttttgaatgtatttgcggaagccttcccggcgttccatgggagaaagacgtttattgtccagataactggaggaagcgttattgcccaaatgccacgatccgttgtcccagtaaaaatcggagtgaggagcgagagcggtaacctggttgtagcggcgttccaggttggcccagtcggaaatcaggaaacagtcgaaagcttccatgctcagcacggccgccaccagggagcggagccctcccagggagaccatggcaagttgttgttccagataatcggaagaggaaagctctaccggattatccagcagcccctccgctttctcctgttccagaatatgattctgcaaaggcaggcgaatcatgccgaagcccagaagggcaatgatgaaaatgacgatggtcttcagcatagtttcacaaaagttgagaaagctattgttcttcagaaaggcatagctccttgatacctatttcttttaggtaataataaataccatcatagaaggatgagtgacgagtcaaatcctcgtcacatccttttggaataaaaataacgaacccttggcgtgctcgtgttaataaaacacggtaagtatttttgagatagagttgtgcatctttcttacgaactattttccaactagaccccttaaaattataagctttaaaatgtcctttttctatacgaaagtctgcatcccatgcaacgattgcccaatcaatttcaagaccctgaatatcaaattcagttgctgtttcttctagaaaataggaagagcgtacatcctctttatcgtttaaaaaccaattttctgcctgaatatcgttctgtacccaaataccaaattggcgtagacgtttggctcctgaactagaaatgagtccataacgttctgtacctcgggattgattttgtacccattgtttagctttttctaggctacgtgtaatgacaataggataattaagtgagagttctgaatagagttgttgagctattggtaagttttcatccaatagagattttacaaatgctgaaactttttcattccgaaaagaacgaagtgagacagaaagatgaagttttttttcctgataaagatgtaatcccataaagagagattcaagtgtttttccttgcgtatattctacatcagagatttggggggacacataaacattccaatgagggaaatggtttcttagtgcatcaaaccaagctaaaaggccagcttctccagtatgtatttcttgaccacctccaattagacaaatgattacagcccaatcttgatggcgatccattacactaatgaggaattctggttcagacatgttccaggagggaacatggcgttttaacataaatttagccgtttgctcttttgtccaagcacgttgtgcttcgtcaaaaatagttactttttccgcaggaacttgttcggaaggaggtagataagtatcacgaaaatgatggatattttgaataaaggcagcaacttttcttttagatgttattttgcctttacagcgtttaatttcatctcgtactagagcttctcgcaggacagcaaccaagggaccattaccggaaagaaaaactgcatgttcttgtttatcatattgatgtcgctcatttgcaatattgaggcctactagcgtttttccggcaccaggtacgccagtaacaaaacaaatagatttttgatgatactgtttactttgttcaataatacgatttagtacctttgttgtgagactaagattgtaggctccggcactactccgtgaaatttctttgactccatgtccacggtagagtgcttgagctgcttcaatgatcgtgggagtaggcatgtatggcgaaattaaccattgtttaaaatggaattcgtcatcacacagattgttagtaagttttgttaaattaggacctaaggtattatcattgcaaaggataggaagataaaccccatctgggttcattataagttgaaactctttagaaggagcatgagtgcagactaccagaggaacaattttcttttgataactttcttgatggaaatattttaatgctagtgcataatctaccacttgatcaatagcatgtcttggataagatgattctcctactttaaattcaaggatatagagaataccagcacaagcgattacgacatctattcgctctccgatgcgaggaatagtgtattcaagggctatggatccagagggaatacttttaagaacactttggagtaatctaatttcgtgaacaaaagaattacgtgaattttgatctaaagaaaatggggtatgaagagcaatctgccctaaaatttcttctagattttgggtgcaaaaagactgtaggtcattgaaataataagacctctgtatcattttagtttattaaatagaatcagaaggactattcatgtttaggcgcttgcggatggccttgtccagaagttcccattccggcacggaggctccggcttgccgggccttggagagagggtctccccagatagccgtgtattcgacggggcggccttcgttgtagtccacggcgctggacggaatgaaagcccccatggtttccgtacgggaaaggtggaattcaaccaaatcttccggcagggcgtagccgcgggccctggctgcctgtactacttcttccatgatgcggcgcgcccgtacgacgttttccggattttggtaaagttccgcaatgctgatgccgcccagagccaggcaaagcccgttaaacgggatgttccagacgagtttgtaccactggatttgctctgcggcgtcaaaggcgcgcgttttgatgccggcattggcaaacagctcggagagttccttggctttttcagtcccttccggcgtggggatgaagggggcgaactggatgttgcccccttccagatggttgacatggcccggtttttcccgcatagcgcagatgaagcacaggcccacatagatacgctccgccgggatgatgcgggcaatttcctccgcatttcccatgccgttctggagtgtaaccacagttgtgtccggccccatcaacgggggaagggctctggaaaatccggcgtttgccgtgcttttccatgcaacgacaacgaggtctaccgggccgacttcctccgtgtcccggtaaacgttgatgcggggcagggagatattcccatgcaggcttttcacctgaaggccgtgttctttcagatagccgtattccgaacgtacgatgaaggatacgtcctgccccgatttctgaagtctggctccgtaatagcaacccagggctccggctcccagaatggcgattttcatggcgtgcggcgcggttggtgatatttttcagagtccctggacgttgcccttgtcatccagatagatgtgcatggcgttcggtgagacgggaagggcgggcatgcgcatgatttccccgcagagggccaccaggaagccggccccgttggcgatttcaaagtcgcgcacggtgatggtgaagccggtggggcgtcctcggaggcgtccgttgtcggaaagggagttctgggtttttgccatacagacgggaaggtccgtcaggcggctggcttcaaactgggccagcttctttttggcggcggccgtcaattccacaccgtccgccccgtaaatgttgcgggcaatgatgttgagtttttcttccaccggcagggcggattcatagaggggcttgaaaggggcggaactcctgtccgcagcttccacaaccatttgggccaggtctttgcctccttctcctccctgggagaagatgtccgcaatggcgcagggaataccgcgttccgcgcagtgtttcacgatagcgtccagttcttcccgggagtcgtcaaagaatttgttgacggcgaccacaacggggcgtttgtagtgggcggcagcgtccagatgcgcatccaggttggcaaggccttttttcaacgcgtccacatccgtgtttttcagatccgcaagggcagtacccccgtgcattttcagcgcgcgtgccgtagctacgatgacaatggccgccggatccagtccggactggcggcatttgatatccaggaatttctctgcacccaggtcaaacgcgaatccggcttccgtgacggcatagtctccaaaatgaagggccatcctggtggccagcacggagttgcagccgtgggcaatgttggcaaacgggccgccgtgcaggaaacagggcactccttccacggattggaccagattgggcatcagggcatctttcagcagggccatgacggaaccggtaatgcccagttcccttgcgaatacgggcttgtcatccgtcgtgaatccgatcacgatgcggttgatgcgttcttccatgtccttgtaggaagtggcaaggcacaggcacgccatgatttccgaagccggggtgatatcgaagcctgtttctcgggggaacccctgcttgttgagccccacgatgatggaacgcagggaacggtcgttcatgtccatgacccgcttccatatgactttgcgttcgtcaatgttcagcgtgtggaagaacatggcgttatcaatgatggcgctgatgaggttgtgggcggatgtaatggcgtggaagtcccctgtgaaatgcatgttgatttcctctgccggcgtcagggagcttttgccgcctccggtagctccgcccttgcggccgaacaccggtcccatggaaggttgccggagcgccaggcagacttttttgccgatggcctgcaatccctgcgccaagccgatggaaacggtggttttgccttctccggatggggtgggagtgatggcggataccaggatgagtttgccgggggctgccggcttgtccaatacgtccagggaaattttggccttgttgcggccgaagggaatgacgtctttttcatcgacgcccagcttgttgatacagtcggagaatgcaggtgtaaccatgcgcacatgatgacggaagccccctcttttggcaagaaggttcatgggcattccggaccggatgaatcaatgagagggaaagggccgccttcttcctgtcccgcgacattccccggatatccatgcaactccgggagaacctccggaaatacccggtatggcaggttacgctaagacgggggtaagaatcagggttgcgctttctgtttcctctcagccagcacgggacggtagtggcccgtgatggtgtgggaaaacaggaagtcttcttcctgcgttccggcgcctacattatgaatgatcagcggcgtgccttcctccgttttccggtcggaaacgatgccaatgtggggaatactatcggacaggttccatgtaaccaggtcgccgggctcgtagtccgccgcgttttccgtaatgggaacggaccaaccttttctggcaaagaaggtacgaagattagggaccctgcggtggtcaatgctgcggtccgtcgttttcaatccccatattttagggtatttggaaaagtgggccttcatgtcctcatgcacggctttttgaaggtccaggccgaaggccctcatggcgcggatgaccacatccgtgcatactcccgtttcgaggggaacgtctccgttggggtagggaatggattgatagcctccgttgtaggaaaccgttactcctacctgttcacgcgccctggccgccagcgcggcgttgtccgccatcaagcatgcagggcaggaaagaaacaggaggatgagaagggccgccggtttcatagggcagatggggagggaaacgcggaaaaatcagacgaagctggcaaagccgatgtccggccggcgctgcatgccgtgaaattgaatctttttgatttcgttgtgggcacgctggcgcgcttcggagagggtatctccctgtgccacgacggccaggacgcggccgccattggtttcataacagtttttatccgcattccatttggtgccggcgtggtaaacggaagcatttgaaatatcgtccagtccctgaatagcgtcgccggaatgggaggtctccggatatcctttggaggccagcacgcagcagacgctccagccgttttggaaggaaatttcttccggcgcaaattctcccttggccccatgcaggcagaaggaagccaagtctccggagagcaggggcataacggcctggcattccggatcgccgaagcggcagttgtattcaattacttttgggccgtttggagtcagcatcaggccgaagtacagaaaaccccggtaaggcagtccgtctttttttagtccggctaccgtcggagccacgatttccttttcaatgcgttccagcatttccggctccaccagccggcgggaagccaccgctcccatgccgcccgtgttggggccagcatcgccttccttgaggcgcttgtagtcccgtgccgggcagaggatgagataatggtcgtccaccagagcgccgaagatggagacttccggtccggtaagaaattcttccaccagcagccgtccttcaccaaaacgcctgtccgtaaatacttctttcaggaaagagtctgcttcctccttgctcatgcagacggctacgccctttccggcggccagaccgtcaaatttcagcacggtaggatagttgtttccgatgaattgccgggcttcctccaatgtggccgctacacgcgcctgcccggtagggatgcggtggcggagcaggaagtccttggcaaattccttgctggcttccagctgggcgctttcttttaccggcccccagcaggggatgcccgcacgggagcaggcattggccaggccttcatccttgaccagatagctttcctccccggcaacgcagagatccattttattggaaaccatccagtcgatcagcgagggcagatccctggccgggatgggggtagccagacggttgatggcgtcacttcccgggaaacagtacatttccggagcggagggagattccttgagtgccttgaccagtgcatgttcacgtccaccttttccaataacggctattttcatacgccgccagtatgccgggacggactgattttgccaagctgaaatgaacggtgaggttttcccttttgtccggttgttcccatgcttttcctccattgccgggaatggggttgtaccactttttcttttcgtggcacggcgcagccattccgttcggggaagatgatgtaaaaaggccgcctgacccggaggaaaggcggcctgtaaaaggaaagggtggtatttgcgtttagaacgggatttcgtcgtccatgtctccgaagtcgttggacggctgattggtggggggcatggggggcgggttgtagttctgggccgggcgggattgtccgtagttgttggaacggggagcattctggtactgctggcgcggagcacctcccatatcgccttcaccgccgcgggggaagagctggatgttttccccaatcacgcgcagcttggtgcgtttctgcccggaggctttatcttcccaggaatccagttgaaggcgtccttccacaaagactccgcggcctttgctgaggtagttgccggcaacttccgcctggcggttccaaagggtgacgtccacgaaagtggtttcttcctggcgttcgctgttgtcgcccgcgtagtaacggttgatggcaaggcggatgtccgtaacggcggttcctttgggagtgtagcgcagttcgggatcagcggtaaggttgcccattaagaagactttgttgagattggccatataggatgggtgttaacgaggtgtatggtatataggaaaagggccttgccgtttaggaggaaggcatgtgtttggtcgctagcaagtatgggcctgcacatggtcttgtgcaatactaaattacggaatcgtccttcatcatgtctcctttctacattgcattcgtcatggaaccgtgaaaactttacctccatgagtttcaggcagcggcggagaaacggactgttccgggtttcctggggcacatgccttttgctgtctgtgctggcacacctgtttttgctggcggggagctgcctggttcctgaagaatggctggcttccccacgtccggctgaagcggcgcggaggaaagtggctgtaagcgcgcgcatggtaaagaaagtggaacctcaactggagagccggagacaagagcccgcggaatatctgcctgccgtcgtgaagaccaatgaggagcaggaaagcgccaccaggccggaagtgcccaaattccagagcaacaggaacacgcgggcggaaggcggccggaaggatccggacggcgacagggatatgcccgcccaggatggcgtggaacgggaaaacggagagattgtcctttttaaccaggaaaggcaggatggggatttaagccatgaacgggacggcaacaaaaacgcctcccccggagcttcttccaatgttctctaccagcccctggaaccatccatgccgcctgccggtcatcccggttccctggctcattctcccgtcaagaagggagagccaggcaaatcggaagaggaaaaaacggcccgacaaaacatccgtcatgcacaggagaaggccatgcagcttccccatgcggtagtgttgcccagccccggagattcggagaagccggatccgcttgaggaattggccaaaagcattgcgaaaggggcggacaatcctcccctgaatcttcccaatctggatttggtgcccaatacaaaaccggttcagaaacagcccttgtatgatcccatgttcaatgcggagagccagcccggcttcaagacacatgagcggaagaccaagcaggtcggcaaattcagctttggccgccgtccgacattggatgtggaagctacgcccatgggaacgtaccaggcgatcgtttaccgggctatcggggaacaatggtaccgccagtgcgatttgaaccgcgacctgattgttaccggaactgtgcgcatccgcatcctgattaacaagaatggcaaaatttcgtctatgaggcagacttcccgcgtgggagccagcgaggtacagaagtcctttaccttcctcgccatcaaactcgccaggcttccagcgatgcccccggaggtaaggagtatgcttgtgggggattctttggaaatgtatttcgatttcaatttttaacaacctaccatcctgcaacaaataccattcacagatatatgatgatgaacttgatcaaagactgcattacattcttccaggcaggcggcgttttcatgtacccgctggcagcctgttccgttcttcttattgcggccgttatttaccgcatgttcaatatgaagaagagcctcatttgccccgtcgtgctgaccagggccgtggagcagtacacccgcggcgccgtggggcgcactgaattggagagaatagctgcggattcggattccgtggagggccgcctggtgctggatgcgttgaatgcaccgctggaggatgaagcctccctgaaggaaatgatccaggtgaaggcccgcgaggagtttgtaacgcttcaggcgggtctgcccctgctggacatgattgtgatgatcgcacccatgttcggcatcctgggaaccgccagcggcctggtgcagattttcagcgttttcggaatggatgagagtcacggcatgattgctcaggggattgcccaggctctgaatacgacgattgccggtctcgccatcgccactccggccgtgattgcccacgtttattattcccgcaagctggagcgtatttccgcctccatggaagtcctgctgacagaactggtttccttccgctgccatcattcccaacgctgacaaggccatgcagttttaccgcaagaaagcaaggagcatgggggtgcccatcgtccccatgattgacatattgaccattctgctgatttttttcattgtccatacgcagtggaagaagccgcagtccctgcttaagatagatgtacccggagcggaattcatggaggggactccgtcttcggaacagcgggccgttctgaccgtgacggggacatccgccatttccctgaatggcaggctggtggagatgaatgaactggctgctgccctggaagccttgaaaaaggaaaatccaggcgtcaaactgcagcttgatgtggataaaaaagcggagtttggcatcattgtcggcatttgggatgcgctgacgtctgtgggtattgacgcaggtgaggttcctgccagaatagaaatcaacaagcccggcgcacggtaagcgccttaacatatatattatccccctcccgatgttattggaaatagcacagtatggaaatccggtattgaaggaaaaatgccgccctgtagaacattttgacgacagcctgaaaaccctggcggaaaatatgctggaaaccatgtacgcagcagagggcattggcctggcggctccccaggtgagcattcccattcaactggtagtgattgatattccgaaggaggaagagtccgtcacctggcttaaagtgaacggagaggacaaagagctttccgacatcatgcccttgatgtttgccaatcccgttctggaaccttacggccccatgcatccttttcatgaaggctgcctgagcgtgatgaaaatacgtgcttccgtcgtgaggccggattttgtcaaggctacggtgcttctgattgacggaagagaaataacgattgactgcaacggccttctggccagatgcctgcagcatgaatgcgaccatttgaacggcatcctttttgtggagcgcgtttcttccgcacagaagattaccctgcgcaacaaattgaagcgtctggcattgggatattagctttccgtgacatccctcaggccctttatggcagccaaaggagggggggcaaagaagaccgcattccggaaccgcaaagtttttacagccggaaaccgtcccgtgatgttcccggcagactataatccacccgggttcgcagtattcggaagagaagaggtcaggacgctttttccggatccggctgaatcggttttccggattctcttttgacgcgtatttgcaaatctgccaaagcgttcatgtagtaaatgtacgcgtcaaaggcggatgcatacggcgtgaaggagttttccttctgcatgtagtggaagtggtccgcgctctgcagtttgcgccaaacgtgggtgagatccttgtcatgggctgccttgaccggtttttccagacggtagattttgcggagggcttcatcctgcatgacgttgccattccaatgggacatggttccaaaagtggagcaggtcatttcctgggtgcactcacagacggaaacgggcttgatttcctgcgctacttcggacggagtcatgaaccggttgccggcgtctatgcaggcgagaatcatcgtacgccagaatccgaagacgcctgtagcgtcagactggcgttcccccagcgtttcatagtccatggacagggtagtgacgcttccctgctggtgcgtcagccaatccgcgaaagtggtgggggaaagcgggtattccgaccattccggatcagtccgcatgattgccaggtcattggagagttcccggttgcggaagatagtggtggtgttatacacccacggagccaggaagacttcattgctggtaaatcctttgagcatggccgggttgccgtccgccatgatgcccttgaagccgagcgtttccgcctgcgccgcaatggcgttggagtacagcatgccggtattcatcagcacatccgtttcctgatggaagagttttttgagaagctcccggtgttcttcaatctgttcggcaaattcctgaggggagtaaacggatgccagggaattgtaataaggcattgccagaaagtccacacagccggtttccgccaaatccttgaatgcggcaatcaggtccggcctgtggtacagggcctgttccagaatgactccgctgagcgccagcccaaagcggaatttgcccccggtgagttcaataagctgtttcatcagccgggttgccgggaaataacagcgttccgccaccgtgctaagcacgcgggcattcagatcatcatcttcataaaaggcatgttctccaattttgaagaagtcataatgaatcagccggttgggctgatgcgcaacgaaagtgagggaaatgttgctcatggacggggtgaagaaggctgagagttatggagtagggtaaaaaggcgtttttagcggttcagcacatgttcatagacccggataaccttgtctgcggcggcatcccaggtggaggccttgatgtcctccgtgctctgttccactactttccggtacaattcctcatccgtgcagagatggacgatatgttccgccatcttgttgacgtcccagaaatccgctttcagggctcccttcatgacttccgccacgccggactgcttggaaatcacggcgggaatgttgaattgggccgcctccagcgcagaaaggccgaagggctccgatacggaaggcatgcagtagatgtccgtgatggagaggagttcattgactttgtccttgttcaggaagccggtgaagtggaatttgtcgcccacgcccttgaaggctccggattcaatcaactggcggagtttttctcccgtaccggccatgacgaagcgtacgtcgtccgtctgttccagaaccttggcggcaatctgaaggaagaatcccgggcctttctgagccgtcaggcggcccaggaagagtacgagtttttccggaaattttttcttccctttgaagactttgaccggatccgctccgttgtgaatgggaaatatcttatgggggtcgatggcatagtgcccgctggcgatggttcccgtgtatttactgaccgggataacggcatccgcctgttccatgccgaatttttcaatgtcgtaaatccagccacgggcatccgctccggcacggtcaaactgggaagcgtgcagatgcaccaccaggggcttgcccgtggcttttttcacttccacgccagccagataggtcatccagtcatgggcgtggataatgtcaaaatcctgctgaagggcgacttttaccgctatttttgagaattgaatgactttcagtgccaaatccccggcgtaaaggtcttccttgttcctgaacagctgaaggtcggcttcatgcgttttggagaaggtgatacggccttccttggtgaactgtaccacgccggattccccttccacggtggtgtaggggtccagttcaatgggcgcgcgctccaccagggcaaagctgtcataggaatatttccggtccacttgctccacttcccgataggagacgttattgagaccggtgagctggaatccgtcaaaaaggacggaagggtcggccttgggaacgatcacccttaaatccactttttttgccagcgccttggaaagacccaggcaggcaatgcccaaccccccgttgaccaggggcgggaattcccatcctaatgtaagaactcgaattgtgctcatcggttgatgtggtttgtcggtgccgggaaggatacggactcgtgccgtgttgtacaccaacgcaataaaaccagatttttcatgttcggtctagattaatatgaataattttactctaataatgaaaagaaaagtgctgctttagttcaatcttgcgttcgtcatgaaattgatttagtctggactgaacgcttttgatcctctcttccgtccggcttcaatgtgctccgtttccaacatccctgaaagacgaaaaacacctcctctccgggggagtttcgtcaaatgggagtacacgaatacggtttccaaaataactctcagcgtgtgtcttgctgatgccggtattgtccgcgtaacgtatttccccggagcggtgccggaagacgagccgagttatgccgtaagccccggatattccgcgccgggagcggaaatccgcgagtatgatgaggccggggttcatgtcgttgagacgtccctgctccgcatccgcattcgcacggaggagcaaaaggtggatttttacgatgttgctacggatgagcccctgctgacggatgagggcggatttggccgggagagcaaggactggactggagacgcccgggtatggatacggaaaaatcttcaggaaacggagcattttttcgggcttggggacaagccgtgcgccttgaacctgaggggcaagtatttctccatgtggggagcggaccattatgatttccatgaggagtcggatcccctttacaaaagtattccctttttcctcagtttgcgggaaaggaaggcgtacggcctgttgtttgacaacacgtgccgttcgtatttcgacttcggagctacggatgaaaaggttctttccttcgggtccttcgggggcctgatgaattattatttcatttacgacagcactcctctggacatcatctccgcttatacgcgccttaccggtacgcctgaattgccgcctttgtgggcgctggggtaccaccagtccaagtggagctattatccggacaaggccgtatacaatctggtggagcgtttccggggcctgggcattccgtgcgatgccgtgcatctggaccatcattacatggaacggaaggagggatttacctgggacaaacagaattttcccgacgcggaaggaatggtccgcgccctggagaaggacggtgtgaagacggttctgattgtcaatcccggcgtgaaggtcaatcccgccaatccggtctggaaagaggggatggaacgcaattatttctgccgccggtcggaaggcaatttattgtcggaagaagtatggccgggactttgcaattttccggattttacggctcccgccgtacgcggctggtgggcggatctgttcagcagggatattgggaaaattggcgtgcgcggcctctggaacgacatgaacgaacctgtcgtttttccggaccgcactttcccgatggatacgcggcatgaatatgacggcatgccctgttcccatgaaaaggcccataatatttacgggcagtgcatggcggaagcctcctggctgggcatgaagcgtcacgctccggaccggcgccccttcctgctgtcccgatccggttttgccggattgcagcgctttgccgccacatggacaggggacaaccggtccagctgggaacatttgaagctggccaatttccagtgccagcggcttgcggcttccggcatttcctttgcgggagcggatgctgggggattcatggggcatcccacgccggaattgttttgccgctggatgcaaatggcttctttccacggttttttccgcaatcattcctccggggagttcggcggtcaggagccatgggtttttgggcaggaagtcacctcttacgtgaaagccgccatagagggccgctaccgcctgcttccctatatctacacgcagttccgccggtacgcggagacgggcatgcccgtgctgcgctccctggccctacaatgttttaccaacaaggacacctactggcggggggcggagtatttctttggagaccatctgtacgtcattcccattcatgagccgcaggaaggcgggcggttcctctacattccggagggcgtctggtattcctaccacacggacagcctgatggaggacacaggaaaggatgtatgggtgaagtgccccctttctttcctgcccgtgtatgtccgcggaggggcggtaattccccattggccggtacagcaatacgtgggagaactgcctcgaccgccgctgacgctggatgtatggtgggcgccggaaggggaggtagcctcccatttgtatgaagatgcaggggacggatatgcataccggaacggagaatgcgccgtgcatgatttcctttaccgcggcggctccaattccctggagctggattggaactgcgaaggggatccctgtgcgttccatgagtccgcagaggtggttttgcacggtttgcctgcgggtacttccgtcagtgcatgcatggacggcgtgccgtgctgcggcgtgatgagggaaggaagggtgtggaaaataccggtgaaggataaatttgacacgctttccgtctgctggccggaggaataatgttcttccattaagggatgaggcgtccggaggaactgtcatggaaggtggaaactgcgcctgaccgtatccctcttcagtttcagttcccgccattcatgcgtcagggtggaggaggccactacgccgcccccggtgcagagtgcgagcctctgcccctgccagtacagggagcggatgcctaccaggcagaaaaagtctccattttccagaaaaccgaacggggcgccgaagtgaagcggacagcggagacgtgaacgccagtcgtccagctgggagagcgtgttttccgtgcggggctgggaacccagggcgggggtggggtggagcagccgtatccagtgggccggagtatgctggtcatcagattccagtgtgaggtaagtgacgaagtggatcagggtgcccaggttcagcacgctgcgtgccgttctagtgacgctgccgtagggggacaggcgggaaagaatgctgcccgccacgatttcatgctcgcggatttccttgtcgtcgttgatgaaaaccccttcatcctccggacgggccgttcctgccagggccattgtctctaggcggcagccctgctggtggaacagtgtttccggagtgattccgcagaatccttcccgttccgtccaccaggcgtagggataatgggacggagagctgctgatggcccgcaggatgagttcccggggggtgtgggggagcagcatttccccgaactgggggatcgccggaacgcttttcatcaattgcccggcagcgatttgctccatcatttccgcaaaaacctgcgcgtatgcgtccggagacggttcctcccaccggatttccggagcaggcggggggggatttccctccgccgggagagcatgaagggctgccggtattttccatggccgcgggtcgtccagccggaatgtatcaatataaaaggcgggaccggaatccggcggttccgctgattcccggaaaggcccggttccgagaagaaggccgtgggaagggtgcttgatcagggctccggaagtcagcgtttttatgtccatgcgcaattcatgttaaaatgccgccgccgggaattccagctatttgaatgtttgtgaagtgcggaagaaacgggaatgacggttcaatgggcgcctccgtttttccagaatgtcccatggatggcatggacctgaaaaagggcattccccttcgtccctgacgctttttcctcctccgttgaaaaagcaggggatgacggccttcccctgcccggagcctgtaacggagagaaactccgcccctgtttcctggagccgtgcgccatgtcacgtgcgttccccttttgaattgacgggaaaaagcacttaagtaagctttaaagagcttccaaccctatgcagataatgaacagaccagcaccatcagtccccaccgccgatattccggtagaggccatgctggcagaggtgcggaagccgctgggacccgtttggtggagcgtgtttctcgccagcgcattgctggcggcgtggggcatagggtggagttcctggcgcattgccgcagagggtgtgggcgtgctgggggtgaataataacgtggtgtgggggctggacatcgtgcattttgttttctggataggcctggggcatgcgggcaccctgatttccgccgtcctgctgctgacgcgccagtcatggagaagcccgattgcgcgcggagcggaacagatgaccctgtgcgcggttatctgcgccgccgttttccctgtggtgcacgtagggcgtgtctggatggcgtggatggcttccccgttgccggaagtgagcggaatttggccagacatggcctctcctttgatgtgggatgtcatggcagtcagcacctattttcttctttccctgttgtactggtatatcggcctggtgccggatttcgcgttgctgagggattgctgcaaggggcgtctgaggcgccggtacgggtggctggcactgggctggcagggaacggggcgccagtggcgcgcctatgaaaaggccagccttctttttgcggttattctgactcctctcgtggtatccgttcattccgtggtgagtttcgatttttccgtgactcaggtgccggggtggcaccagagcattttcccgccctatttcgtagggggggccatcctcagcggcatggcgatggttcagctgattctgctgggggtgaggcgtctgatggccggcagcggcgttcgccgggccgttactccggccattctggatttaagttcccggtttgtgctggccctgagcctggtgatgggagccatgtatttgtgggagcatctggcagccattctgaatggaggctctccggagccgtttccgggcagaaatcctgtgaatgccgtgttcctcatcgtcatggttgccgggaatgtggcgctgccccagttgttctggttccgctctctgcgaaccaaccgctgggtgatcgccgccgtggctctgggagtgcttgcgggcatgtggatggaacgtttctggattgtcgtgaattccctgaaggcatccctgctggctgccaacatcggagagtatttccccagcgtgacggatttggccatgatggccgggagcgtggggctgtttatggccctgtacatggcgctggtgcgtgtggctccgttcttctccctgtgcgacgtgcgggaacagcaatccctgaacaaggagggcggggcatgaaaaagcccgtcatttccggctgggtgctttccttcggttcggagaaggcgctccttcaggccgtccgcgtgctggtgaaggaggaaaatctgcgctgggaggtttgcgcaccttacccctgcgccgctgttcgtcttgccaacaggcacgccgggaaggctgtgggagcaggcgtccggctgtgggccgcagcgggcggcgtctgcgggtttctggccgtggctctgtggctttactggacgcagttctgtgcggatccccttgtgacccagggcagagtccagggctgggacagctggcccgcatatgtccctcccctgtttgaaggaactttgctgggggccggattgctgaccgccgccggtttcctgaagggggctcttctccctcagtggcacgactgggcgttcgagtgtgattttttcaggacggatgagcacgggaacggttacttcattctgctggaaggcgggagcgaaggccatgccgccgttttggctgaagccctgcatccggatgcccgcgagtacgttcatgggaaaggaggccgggcatgagaggaggcatcacggcggtagcagcccttgttctcctgggagcgctctggttcctggcaggggacgacgatggaagaaatgccgttccccgtttgtttgacaatatgaatgatcgtcctctggcggatgcccagcaggtggggatttcttccgccgccccggaccggaaaacgcgtttggcgcctccccgctccgtggcgcagtccctgggcatgaacggaacggtccgaaaacgggaggatgaccgggactcctttgctgcggaaggttcctatttttcctccggccgcatgcagggcggagaggaggattccatgcctctggaactgggcggcatctcccgcagccgcgacgtgctggcggaggggcgcgcgctttatctggcgcattgcgccgtttgccacggagaggacggaagcggacgcggaagcatggccgcttatgacacctatccgcaaataggccccttccgggatgaaaaatatgcttcctattcttccggaaaaatgttcaggagcattcggttggggcaggggaacatgcccgctttcggaaacattctcacggcgcgggaaatctggtgtctggtggcgtttatccgccatttgcaagcgccgccggaagaacctgccgttcaacagaaggaacaacattcatgaacagcaatacatcttcaacaggcggggaacgccgagaccgtccgggattcggctgggccgggcgttccgctgccctttccctgtggatcatttccgttctattatggtgcgtgctgatgcgccagtcctttacggccatgccctgggacgacatgacggtagccggagaaaggctgcaggaattgagaaggccgttcgccgctgccggaatggccgtaggaatccttggctccagcctctgtctggggtgcctgttctggctctgcctgtcttcactgacgggttccggctggggcattgctctgagaagggtgctggcggcgggttgctgggggtttttacccggtgttttggtattggccggaacggtcggctgcctgactaccgtgatttttccggaagcagcccgctactggggagtggcggatgttgcctctcccggcgtccagcccttcggcgttctggatttggctgacttctcatggtggaacccggcatggctgtacgtgcgcgtggggagtattgcggtgctttcctggagcatggcccaggtatgggaaacgctggttgcggaaaaaaatgtctggcagccttccttccgccggggctctgccgccttctgcatggttgtgacggtgatgatgctgggcctgctggggatggacatgctgggagggacgggaaaggtcgttctatccatgttccccgtatacatgattgcatatgttctgctggtgtccctggcattcgctgtgttgtctgccgtgttcctgaggcggctggacggagggaaggagctgccttggccccgcctgggcggcatgctgacggccatggttctggtgaaagcctatattgtgtattctcagtacatgattacctggtacgcctccattccggctgaaatgtccttttataacgcagccgcttcctccgtctggtccggaatgtttgccgcggctctagttcttcagcttctgctgcctttccttattttgctgtttcccgcgttgagacgccggccgtccgctttgggcgctgtatgcgccggggtgctgtttggctccctgctggaagcatgctggatgttcggccccggacttgggctggacccgtccgcatggaaggcatggcttccgcttgtcctgctcttgggagggatggccctgatctgctgtttttccttcctgggggcactgagcgtccgcagggtatttcccgaatcatgatgaaccgtaccgccgccgttttttttctgttttcccgccgtccgggcgagtatctccccctgttctggctggcaggggctttcgtgctgggtttcctgtggtcgctggcgtacgcttccggtctggtggcggaggagcctttgccgtggccggccggccgcctcatgttcgcattctacggcatgctggtgtacggctgggccctccccatcctgttttcctttgcggcgggaagcaggagccggtggatgaaacccgcagaatggctctggcatgtctgcgttgcgctggggttggcgactattgccgcggggtatgggagcggcgtgctcctgatgccttttgactggtgggtttgcccggtttttgccttccttgccgcaggggcggcgtgcgtcgcatggttccgtccgtttccgtggcctgtacggctgttgttcagttcctccgccgggtgtgtggccgcggccctttgggcgttgggacatacgcaggcattgtccatgaatggcctgctggatgtttccgccctgggaggaagcctgtcctgcgggctgatgtttgccgccctgggagcggcggcgctccgcctggatatggcgcaggggagggcagccggaatcctgtccgtctggatggccctggtgctggcggcggctccggtgattggcgggctgggggggcttcaggggtttcccgtgccgtggatgttggtggaggccggtaccgcctggttttggtgcgccgttcttcccgccgtcctggcggtggcgcgtttttggataaaatccggtacgaagaccggaatatgggtgaagaccggagtttccctgcttgccttgctggcggcatggaacgtatttgttgtgggtgcgcctgagctgatgcagttttccctgtctgcgtggcatgaaccggaattatggattctgctgggggccggagttttgatgatggcaggggggaaggcccccggacatttccctgcggcatggcggctgttgggcgcaggcgtctgcggcgtgcttctggcgtatgccgtgggcgtgcttgccgccctggatgtccaggcttttcctgaggcccgtcgcgcggagctgatgagcggctgggtgggcatggctgcctgcatccacgccgtagccatggctttttgcctggcgggcagcctctgcctgtggcagccagcgggagcggaagacggaggccgggagtcttcccctccgtttttgcggcgtttcttcttcatttcagccgtagcggcggctttggcgctggcgacggctgcggccgttgttctgcatgctccgcctccggataccatggaggtcaggaggcacgttcatgatgcggaaggttccggcatttacgccgcagaggggtgtgccctgtgccatacccagattatccggcgttccctgtccggaaaggactggcagacggcgattgaccgcggcacggatcctgatttcccctaccgggtcagtgaaccggaagacatggatgccgaattcaacagggaaggggctccgcaggcgggcgtggcggccataggcccggacctgagcaatgcggcggaatacgccgccgggaggctggaatatgaagacgccgtatccggcggcacgcgccgcgccgcacaggtgcgggaatggctggccctgcatctttacaacccgcgggaattgcagttcaacaagccctggaccatgtgtccggccatgcccggactgtttgaggaacgcccggtggaagggaacgccccctccacggctgccctgcctgtccggatggaacggggccgggagctggtgccttccccgcgcggggagcgcctgttgaactacctggagtccctgcggagggtggaaccctccctgaagcgcgaccaaatccattccttcccggccctgtcccatattcacccggattatgccgcgcatcctcccgccgtggacatggaacgcctgaagaaagcccgcgccgccgccgtgatggaaaagggcaggggcgtatacctttccaaatgcgccatctgccacggcaacgacggcatgggggacaaggtgacctatccgcccctagccgggtccgagtggctgaaggaaaagcctgatgcggaaatcgtcaggatcatcctccagggactgaccggacccatcatggtgaatggaaaggaatgggattccaccatgctgccgcccggcgtcacggactcccgcgacctggcgaacctgctcacattcctgcgccgccagttcggcggggtggagaaggcggcctatacgccggagcaggtggacgccatccgccgggagctgtgacgggagggcccccgattacaacgtttcatgctccttgccccgggaacggaaatggctgcaaatgccattctatgaatttagatgatacgtccgccctttctgcggacagaaacgttgtaatcggaacaaatgccagtgccgccaatggcacggacaatgttgtgataggttacctcttccaccagagacgaccggggtaccgttgtgggttccacgtccgtgggcaccaactccgccggaaccgccctgggggatcaatattaaagtagggaattcctgcgtttccgtaggttcctggtccaatacggaccactgttacatggggatagccctgggttatcagagtaatacgtccaatgaatcggagaagctccatacggccacggcctattccttctgcgcgagcatgggggcccggatcaaggaggccttctgcataggcactggcagggggatttatgtggaagacggctgcgggcacagcatcgtgcttggtggctattccaggccggaagtgcccagcggcattgtgatttccggcggccacgcgacggccacccggtgtggttcgtcagtccgggcgtcaccagcggggagatgatgctggccaggcaagcccttttagatttccacaacttcctctttcgtgatggcattgtaggccagtgttatccctccgaagccggaaccgggggccggaggattgcccgggtcaatgtcctttgccagcaaatccagcgggtataattccagtttggtgccgggggtgcagaaaaataccacgtcgggattgtccccggtctcgtccgttttaaaaccaagcttgtcccggtaaaattgcagggactttttcatgtctatgactccaaggcagatgccggttactctgttcatgttcttcttcatggaattggcgaatagcctgtttttctgtttaatgttttgcggagcctccgccaggaaaatgtgtttttcccggttttgttaacgtctggttttatggtgaaagaaacggagccgtccgcaggtagttaaggaaccttttcatgaatcttccttcctcccgcattccctggctggacaatatccgtgtttttgcctgtattctcgttattgccagccacatcgtggggcagttttttgtgtcgcctcctttcactccggacaatgaaacctttgcctggtcctccttttatacggtgctggtgcgggtctccatccccctgtttttcatgatttccggcgccctcctgctgcccgttcgggatacgacggggcaattcctgaaaaaacgcttcacccgcgtcctgttccccttcctgctgtggtctgcgttttacactgtttttccgtggagctatgaaacgctcacggggaacagctttcactccgtcttccccctctcacaggtcacgccggacctggaaaccatgggaacgaacctgctgctgattccactgaaattcagcgtgggcattcatctctggtatctctacgtgctgatgggcctttacctcttcctgccagtaatatccccctgggtggagaaagcgggaaaggcggcctttgcctacttcctgctgctgtgggcgctcaccctcttgttcccttatctccagaccattttccccagctatctgggaaaatgcccctggaatgaatacggggccctgcattccttctccgggtacctgggttacatggtgctcggctgctttctgaggaaataccctgggaatgcctccttcgcccgcacggcctgctgggccgttccgtgtctggccgcggctttttggtttaccctccatttctaccggacgtccacggctcaggcctggtcctcaagcggcgactacatcggcttcgccagcattaatgtggcccttatgtccgtggccgttttcgttctcttccagtcacttcccgcgttcagagccgggtccgcgccgcggcggttcctggctgatttctccagcatgagtttcggcatctacctggtccactttgtgctggtgggagccgtttaccgcctctttggcatgctccatctgttgttccttccggcttctctttccatcccgctgctgactgcggcgacgtgcctggcagcctggggaatcatcaagctgctctccttcctccccggcagcaggtacctgatcggataaattccggcatggagacaaaaaactgccctccgcaccgtgtggcgggagggcagtccggatggaaaaagcgggaaaaacagggatcagctcaggttttccaccagtttgtcgccgtaagcggagcaggtaagttccgtggaaccgggaatcatttccgcaaggtcgaacgtaaccgttttttcggaaatcacccggtcaatggcctgaatcagcaggtcggcggcttccgtccagcccatgtagcgcaacatcatctccgcagacaggatgacggagctggggttggccttgttcagtccggccagtttcggcccggtgccgtgcgtagcttcaaaaatggaatgccccgtcaggtagttgatgttgcctccgggggcgattccgatgccgccgacctgcgccgccagggcgtcggagatgtaatccccgttcagattcagcgtggctaccacgtcgaagttttccggatggagcagaatctcctgaaggaaggcgtctgcaatgcaatccttgataacgataccgttgggaagtttcagccaggggccgtcccctatggggagggcgccgtattcccgccgtgcgacatcgtatccccagtcacggaagccgccttccgtgaatttcatgatgttgcccttatgcaccagcgtgacgcttttccttccgtttttcacggcatagtcaatggcggcgcgcaccaggcgctccgtgccttcacgggaaacgggcttgatgccgaagccggagctttccgggaaacgaacctttttcatgcggtccgggaaaatgcggctcatggtatcaaaaaacagcttggcatcctccgtgccttccttgaattcgattccggcgtagatgtcttccgtgttttcgcggaaaacgaccatgtccactttttccggagctttgacgggagtttcaatgccgttgaaatagcgcacgggacgcaggcagacaaacagatccagatcctgccgcagcgtgacgttcaggctgcggatgcctccgcccaccggagtggtgagggggcctttgatgccgatgaggtacgtgcggaaagcttccaccgtttcattcggaagccaggtgcccagattatcaaaagatttctgcccggcaaaaacttcataccatgcgatggaacgcctgccctgataagccttggctacggctgcgtcaatgacacgggaggcctccgcccatatctcaggaccggttccatcaccgatgatgaaaggaatgacgggcctgtccggaacgcaaagcctgccgttctgcatggtgacggctgcaccgtccgcgggaggggtgaatgttaaattggccatgacgtgcgttcctttataggacgcagcccggtttggcaagataaaagagcggaatggggaactgtgcttctggagctttaccggctcctgaagcaaccggccttgaaaatgttttcctcttgtacctcagaaccagcggtccttcccggaaggttcttccggctgcccggcttcttcccggaggcgtttgaggaaattttcttcagcctgatgtttcaaaccgctctccatgatatgcttccgggcgttttcgttcagctggttgacggcaatggcggcatcttcggaagtcagcctgttccagatgccggcgtcatccttcacgattcgcagggacccctccaccatctcacaggaaatcagcttgccatgaaggccctctgccgtaatggggcctttgtttcctgcgggaatgataatccgaagaggttcgggcccttccagattgatgcccccgtgggcgcggtaggccgctttcagaatcagcgttttcctgctccaccaccaagtggtggagtaacggtattcatattcaaaagtccgttccactgttaccaggttggccactttttcatccttctgcacaatcagagccacgccgccgtggttggaggaaaaacccttattgatcagggtgaggcccgcttccctgccggcttcaatcagtttttccgctacagccatcggcttttccgccggggcggtgatgcaggtgcgcacgccccagaacaatacggccagcacacctatcagaacggctcccctggccagcgcgacaacggcgggggaatggaaaaaggtgggggaggatccgctcatgagatgttgtgcttggcggaaattcagggttccgggtcttcatgggagccatgttccctgatggggggcatgaacagggccaggaaggtgaaggcgatgacggtcaggtcatctatctgtcctactcccggaatgaagtccggaatcaggtcaatgggggaaaaggcataaagagccgtcagagccaggaggacaagcttgcgtctggtgaacaggcgcggttctccttcccggctgcggaagtaattgatggccctgaccagaagctgttgtctggagccgttgggcggaatgggaatcttgtttttcatggagctgcaggggtgaatttaccgtcaatggaaaggaaactcttttttatatggaccggaagaagacccgaaggcgggataacggcccccttcgtcctgccttgtcccggcaacggcacgggaagggatttttttgaagccgttttctgtaggcgtcttttcatcaggaaagctctttccttattgtctcatgcactcccggccgcgtccagagcaattcccggcttcttccgggaatgagcttccttgcatttgagagagagtataacgtttacttttgtccctgacgttttccgagcctgttttcccccagccgcaaaaacgttccgcagggtagaggagagcttcttccccattggcctgcgttcccttcccggcagaggtccgcttgggcttgcggcattgacacggcgggaggcacggggtactctcctgcggcatataatgatcagttttaccaatatcagcggggccgaggaaattggggccaattgctatttgcttgagatggacggcaccaggattgtgcttgacagcgggatgcaccccaagaaggaggggaaggcggccatgccggattttgattccctggaacccaattccgtggaagccgtttttttaagccattcccacttggaccatctgggaacgctgcctgtgcttcaggagaaacagccagcggcggaggtgttcatgacgcccgccgcggcagccctgtctgaagtgatgctgcataattccgtgaatgtgatgagcgccaagaggctggacctgggtattgtggagtatccttttttcacccataatgatctggacagattgagcgacgcctggcatgccaagtcctgcaatgaagtgttccgcgtgggcttccgccagaacgtgctggccacgttttacgatgccgggcacatcctggggtctgccggcgtgatgctggagggtgagagcggccataccgtattttatacgggggacgtgcagtttgaagaccagagcatgattcccggggctgattttccggaatccggcgtagatacactggttatggagtgcacgcgcggcggtttccagcgtagcgcccactattcccggccggaagagatggtgaggttcgggaaagcgattgaggagacgctggaacgcggcggcgccgtactgattccggtattcgccatcggcaagagccaggagatgctgttcaacattcaccgtttcaagcagcagggggtgattcccgccaatactcccgtgtacttcggcgggctgagcgcgaaagtttccctgttgtacgaccgttttgccgggttgacgcgcaggcatgaccatgaattcaagctgaaggaggagattcagaccgtgccccttccgcgcaagggaaaagctccgctggtgtgttccccggggaatatttatgtggtgtccagcggcatgatgacggaaaatacgctttccaacgtcatggcggagcaggttcttccccaggagaagaatgctattttgttcgtaggatatgcggatcccgattctccggcgggactgctgaaggcaactcctgaaggggaactggtgaaaatgaggcccaacgggcagccggtgcgccgcaagtgcaccgtggactgttttgatttttccgggcatgccacccgggactccctggttaattatgccgtgaagctgaaccccaggcaggtggttctggtgcacggggacccggatgccgtggagtggatgcatcacacgctatccgccaaaatgcctgattccaccatcgtcgttcctgagccgggacgccgctacactttcgagccatgagttttaccggagaaagaaaggggaggctgatcgtctttgaaggcattgacggcacgggcaagtccacccacatcggccacttgcgaaagtatttggaggagaaggggctggaagtggtgcagagttttgagcccacacgcggacggtggggctggatgctccgggactccgccgtgaccggacgcctttccgtagaggaggaagtagccctgttcctgaaagacaggagggaacatgtgaagatgctgattgctcccgcattggcgcggggggcatgggttctgctggatcgctactatctttccatgatggcttaccagggcgcgcgcggcatagatccagaggttatccgtgccgccaatgaagaatttgccccggtgccggatgccgtggtctggctggacattcccgtttccgtggcgctggaacgcattgggaaccgcggggaacgcgacgcttttgagacggaagcgggcctggcggcctgccgcagcgtgtttgcatccgtccatgctccctggatgctccgcatagacgcagacgccgggaaggaagaggtggcggcaagagtgcggaaggctctttccatgcgtttccccgatgtcattggggcataggcatctcctttcggccataggccggggatttttccttagcgtttcattcctggcatttggatgctattccgcaggcgcataagccgttggatccggaatcccggcttccctgaaggcttcccggcgttccatgcaggtggaacagacgccgcagtggacggctccgcccttgtagcaggaataggtgcgggaaaagtccacgcccaaatcctggcccatggcggcgatgccgcccttggacatgtggatgaaagggcgcaggatgcccaggccggcataggttcccaggcgaatggcttccgtcatggcggccatgaattcctcccggcagtccggatagatgctatggtccccggaatgggccgcaatgacgagctgctgcgccccgcagctttccgcaaccccggcggcgattgacaggaagatgccgttgcggaaggggacgacggtctgcttcatcagttcttcatcataggaaccgtccggaatatcgtccgcgccggagaggagggctgatttcaaatgggaggagatggaggaaatgtcaatcacgcggtgttctatgcccagactggcggcctgccaggcagcgcatttcagctctcgttccgcgtggttggaggcatagtcaaagctgagggccacccggacgcggtggttccggtgggcccagtgcagggctacgctggagtccaatcccccgctgagcagtacggctgtttccattttgtccatggtctggattacagggggcggttttccggattgtgttcggctgttgcggtcagctggatgccgccgcggggggagaagcggccttccaccttcagccaccgcggggaaatggcggccaccagatcatccgtgatgcggttgacgatttgttcattaaaagccggatagttgcggtaggaggccaggtagtatttgagagatttggtttccacgcacttttccgccggaacgtaggtgatcgtcaggtgacaggaatccggttgaccggtaacggggcagagggaggaaaattcatgggtgtccagcgtgatggtgtagggacgcgtgccgcggttggggaaggattccagcctggcgtcgtcgggattggtaaagaaggagctttgagagcctaatagagtcagatggtcgtcggacatggttgttgtagtatggtaatggatgttcaggtcccctggacgggggctccgccggggaattctttcacgtacaggtcctgttgagggaatgggatggaaatgccgtgttcgttgaacgcattatagatgtgttcccgcacggaggaaaggctggaggactttgtcatgacgggaacccagacccatacgcccagattgacggcactgtctccgaaactgtccagcaccacgctggttttcttgactttggaaaggaagggcagggttgccagcgtttccagaatgattttgcgcgccctttccacgtccgtcccgtaggaaatgcccacttccaccttcacgcattcgaatttgtggttgcgggtcatgttgcggaagttcttgttgaaaagctgggagttctggaaggcgatgatagagccgtccagcgtctcgatcatggtggagcggtagcccagggaggagacgcggccccggtagccgtcgcattcaatcatgtcgccctggcgcaggcgacccagcattagggagaggccgctgatgatgttttcaatggtgtctttcagggcgaagccgatgcccatgctcaagcctcccatgaccatcagcagcccgttgtagttggcgttcatgatgataagcgccgtaaaaacgaagagcccccagagaaaaagggtggagagtgtcacgaaggtggggatgatgcctacttcataatcttctccatagatttcatgcaacgcattttttcccaagaatatcaagtagttaagaacaatagcaatcaggatgaccgtgatgacgctgctccagctgaaagtgagcagatccttgatttccgtggttgcgaaaatcttattgatgatgaggtcccccatgtcgaaggtggcggcgggccagatgatgctgaacaggatgaggaaaatggtcaggcagggaagcaccagcttggagatgaaggggcggaaccacaggatagccctcttgttccgttccttccggcggttttcataatggtggagcagatcccacagccccaccagcagcaggatgctggtcatcagcatgatccaggtcatcagcaccaggaaggccatgaagctgaatccagtccagcacaggacgctgcccaggatggtgaataccagagacacggtggagaaaaaacggtccagccggggcagcttgtgcctctgccgcacccaggtcagcagggagaagagggaaaccagcgtgaacaggatgggcatggaaatgtccacgatgatgttgggggccatgaacatgcgcagtagcatgaagaatcctcccaaaagcagatagggcatgtagatgcggatgccggagttaatggtgccgtacggaaggcgcgtgaccagggagaacaggatggcgctgaccagaagaaggaattccgcgcccagggaggccgcgctttccagcaggtagttcggcgtgcgcagtgaggcaatgacgaggatcagcgccacgataagaatggtggtgacgttggcgaaagcatggcgtttgttgtaatgccccgtctttttcaatgtatttcggaagcccaggaagatgatgatgcgggagaggcagtaggagcacaggatgattcccagcaggataagtccgtaatgcttgagcgtttccgggtccgacggaagctggagcttgctgtccgcggatgtttcccatgcccccatgcacgtttcatacgtcttgtgcggtttgagaaagatgtaccgggccgcgtgggacggcgtgtagaagaccctgttaaacagggcggtgaacagtttggcactttcattgttgagcgcgtctattttgccgttcaggctgctgaaaagttccttgaggtagctgatttgctccttttcactttggagggattcttccagctcctggcaggcatacagggcttcgtcccgctgaaccagggaggcttgcgacagggtgtccgtatttacttcctccagggatgacgccagctttttaatgcgttctatttccttgtccagccgttcctcctgcccctggaaatccggtttttgggcgtaatacgtcttcaccaggctggaagcggccttacagtaaaaggccagcgtaaatattttctggtcgtccagcgcgtaaagcacggcggacatttcatataccctagtgtcaaaataattataggtagcatccgcttccctcaccagcgttttccggatggccatccttttttcctcattctttttcagaatggtgatttcatggcacagagccatgattacggtatccatttccgattggtccggctgctcctgaggctgttctgccttggcttcctccgcctgttccggagcggaggcaggcggagccgcctgctgtgcagatgcagaacctgcggccagaacccccgccaggaaaaaggcggcgcagcggcggaaaaagatccggtaatcagggatgctcatgaatggtccctgttctaggggctgcaggcattacggtcaaggttatatattctcctgctgacggagggtgagcttcacagaaaaaaacttttttcaacgtgaaccgtatggaaaggacagggcatcttccggcatcatttcccgattccccggaagatgcccttccgtaaacaggaaacgcaccggaaaatttccggtgcgtttgaaaagatgaatactccggcgggaatcagtccagggaaaaggaacggattctccttacggtttcctcccggcccagcagggaaaagacggaggaaagatccgggccgccgcttaacccggtgagggccacccgggcagggaacatcacggctcccatttttacgccgttttccttggcaaaggctttcagcacgccgatgagttcatgtccatcccattccggttcctgttccagcctgtccgccagtttgaaaagcagttccagggcttccggctgaaccttggagacggcttccggatccatgcccagttcaaaaaagaaacggattttatccgggacttccgccagggtctgcacctttgtttgcacggtggcgatggcggcgtccagaatcggggaatccggcaggccggctttcaaacagaaggggcgtgcccggagggcgaattcttccgcaggcagggcgatgatgtgctgctggttgacccagcggcatttggtgatatcgaatttggcggcggagtggttcacggcttccagagagaagcgttcgatcagctcctgaggggagaaaatttccgtatcgtccttgggagaccagcccagcagggccagaaagttcatgacgccttccggcagaaagccttcttccgggtaggttcccagggcggcgcccacgtcgcgcttggacattttggagccgtcctggttcaaaatcagcggcatgtgggcgaaaacagggggagtgacgccgaaagcctcaaacagctggatgtgcttgggcgtgttcatgatgtggtcttccccgcgaatgacatgggtcatcttcatttcaatatcgtccaccacgttgacaaagtggaagatgtaggaaccgtccgcgcggcggatagccatgtccggggtgttggaggcgtcccggtagtcgatggtgatgtctccgcaaatcaggtcatggaaggtgacgggtttggagcggtcaaagcggaaacgccaggctccttcatcctcgtacacgcggccggcgtcctggagcttcttgaaataggcgtcgtaaatatcgttgcgctggctttggaaataggggccgcaatcgccgcctttcatgggcccctcatcccagtccagccccagccattccatgccggtgaagattgcgcgggtagcctcctccgtattacgggcgttatccgtatcttcaatgcggaggatgaaggttccccccatcttgcgggcaaacagccagttgaacagggcggtgcgggcgcccccgatgtgaaggtagcccgtgggggaaggtgcaaatcttgttctgacgagactcatgatgggtaagagagtaagggcctgtctgcccgcgtcaagcagatacagggggtgcatgccaaaaaacggggatgcggaagcagtggattttttaggacgttgtcggccttgcggcttgcgtggagagggcttttaggcttcatttaacgccgtgttctttttaaaacacatattccgtctgcgggagaagtggcagattaaaagggaagatgaggaaaagccctttctggagcatctggacgacctgcggaccatgctgctgaggatggctctgtgcctgaccgttagcacaattctgtgcgccgggtttgcgtccaatctgatggacatcctgaggcgtcccgtcaaccaggtgtgggatatgtttgaagaatcccatcttccggcagggattggtctggatgcctggggtaaggccaaggaaatggcaacggccatgacgagcctgggagattcccagcgggcattgtttctccgccaggtttccccgtcccaggcagatttgacggaggctgccctggttcttcgcggcgcgcagccgctgccggaggacaggaagcaggttttcatcagggaaggcagcccctccacggccgtgagggatctggcggaagccctgtattccaaaggagccgtgctggcagacggaacggggcggggggccctcaagatgatgagcgcgttccagcccggggaggcgtttatgctgaccatcaagctttccctgtatgccggagtggtcatttccttcccgcttctgttgtacttcctgctgcaattcatcattccggggctgctggaacatgaacgcaagctgctgtacaagtgcatggctgtcggcttcggtctcttcctggccgggacgctgttttgttacttcatcgtcctcccgcgggtattgacgtttttttacacttattccctggaattcggtatctccaatgaatggcgcatcggctactacctgtccttcgctacgcagatgattttaatgttcggactggcttttgaattgcctgtggtagtgatgcccttcgtcaagctgggggtgctgacctatgacatgatgaagtccacgagacgctatgccattgtggctatcgccgtcctggccgcggttatcacccctacgccggatgtagctaccatgatgctgatggccgttcccatgtatgcgctgtatgaaatatgcatcattctggcctggatgcatgaacgcaaggaggccgcgcgcacccgggaggaaatcgcccggtttgaagaagatttcaacaacaacaattctccctacaacctgtaaatacatccaacctaagtcaatatcatgaaccttctggaaattattatcctgggcattgtggaaggcctgaccgaatatctgccggtcagctccacgggccacctgctcctgacggaatccctgctgaacatgtcccagagcaaggaagctctggatgccctggccgtctgcatccaggggggagccatcctggcggtgctgagcctgtattttccgcgggtaaaggccatggcgcagggcatgcgcggcaataaccccgccgggctgaaactgctggtcaacctcattctggccttccttcccgccgccgtggtgggcctgtgctgcgcttcactgattaaggaatatctgttcaacacatatacggtggcttattcatggatcgtagggggaggcgttattctggcgtattgcgcctggcgcgccagggagggccgttccaatgaaggggactccggcgcctccattgaaagcctgacgccagccaaggcgctgacggtgggcgcactccagtgcgtggccatgatccccggcaccagccggagcctgatgaccatgctgggaggcatgtttgtggggttgagcgtggaagcggccgtggagttcagctttttgctgggattgattaccctgggcgcggccacggtccatgatgcgtataaggacggagctctgatgctggaatccttcgggtgggaagcacttgccgtggggacggcggtcagctggctttccgcatggctggctgtaaaatggatggtatcctatctgcaaaggcacagtttttccgtattcggatggtaccgcatcgccattggtatcgtgacgctggttctcctgtccatggggctggtgcattgaaaaacggattccggcattcaagcaccggaaaacgtttttctccgacgaggcggttctctcccgcagcggaaagcgggttttgaacaatcccggagaaggatggccgctgcctggacgatgccatgacacagggccgttttgcatccccggaacaaaacagccctgcgatgaatagcggttcaggaaaacttatctcctgtgcgttccgtgggaattcccgggattggagggtttcggtgaaggggatggacgggatggcgcagatgaatgaggggaggacggcctgctgggtgcgctggcggaatggggcggggaagaaggccgggaaacgggagagggcctgccgggacggttgatgccggagtggcctggattgggggcggaaggccttgaagacggcagggtggaagggcggctgggacgtccgaaatccggtctggagggacgattgccttccgggcggttgatgacggggcgattcgtgccgccgggacgggaaggattattggcggaagggcgagaaggccgtccgggctggttgattcccggatgatgtactggcggccgctgtaaattgccgggttttccaaagtccggccgttgattgggccgtccgggctgaggggccggcctgttgtttcccggacggaaatggtcaggcctgaagtggggtttcatcggcggttttgccatggggcggcagttatggggacggacataatgcccgcggtaatagggagccggcccccacgtgggaatatagtaattcggacggatcaggttgatggagtaaatggggcttccgaacgtgtcgtaggcataaatgggtcttcctccataatatccgtaaatggggtagccggagctgtcatacatgtacgacacgccggaacctccgctgctgtaggagcctgacacgctgaaattgtcataataaggatcgtagcagccggacaaagcgcagccgatagcggccgccagcagtgagttttttaagataacgtatgctttcatgatgacgaaacagggcggattatattttccctttgcctgaaaagcggcaaggaaaaagtacatttgtttaaaattattttgcttggaaacgcacttcctgttgtcttagactgcaaaaacgttctacgtgatgggaattcttcttcaaaataaaaaagtcggcctggctctgctgtgcgataacgccccttatacgctggccatgactctggcttcctatggcaggtccgggctgcttggctattttgacgaagcatgcgccgtttttccggaaagcgccgtcaaggtgcgggagacggccctttcccatgggctttccgcggtggccgccccggtggaaggcggttttataggagccctccatacggcggtcaacgctcttgatacggattacgtgctgctggcggaggatgattgcatgatctgggaacacctgcgcggggaaaacctggaaaagcagttgaaacgggcattggacctgctgatttccggacaggcggatatggtgcgcctgcgccatgcatggcgcggttgcacgcgctataaggccgcttatacatattcctacttttatcccgtggaacagctggccaccatgtgggtgcatgcggaaggtttgtcggaagcgccggactggattaaaagcatccggcgcttcttccaccctctccgctccaaacgttcgataggccgttgcgtttatgtggagcagaacccgcatcttcgctttccccagtacattaccaagattgatgaaggctatattattgacagcgaggttttccagtggaccaatcagcctacgctcatcgcacgttccagaatcaggcagattctgacggggctggagcagatgtccggctccatcgggaaattgccgcaggattttgaacatgccgtcaatagcccgcgatggaggaacgcccatatgaacataggcgtcatcaggggaattttcacttaaatgcgtatggaagacggcggaaaagcggtgcggtatgaatgcaccagatgcggcgcgtgctgccgctgggccggggatgtgtgcattgagacggatgaaatccgcgagatttcccgtttcctggacatggacgaacaggtttttattgacacatgctgccggttgagagccaaccggcgcggattgtccatccgggacgcggaagacggcgcctgcatgatgctgacgaaagacggctgccggatcaatcccgttaaaccccgccagtgccgggattttcccaacaaatggaattttcccggctggcgggatttgtgccgcgccagagaagtgggagaggaacgggaagcataatatggccggaatgccgcaagatttttttctgcttccggcattattccatggacggggtgaaatccggctggaatcttgcgttttttacaggaactgagccagatcccgttcaaaaccgggataggacgtattgatgcattccgcatccgtcactacggtttctccctgtgcgctgagtccggccaccaggaagctcatggcgatgcggtggtccccataactggataatttcgttcccttcaggggagtgccgccgtgaacaaccatgccatcgtcaaattcttccacatccacgcccataagccggagattggccgccgtggtggcgatgcggtccgtttccttgacgcgtaattcgcgggcgtttcggacgatgaagtctccccggcccagggctcccgctacggccaggatgggtatctcgtcaatgaggttgggtatttcttccgggaggaggctggtgccgtgcagggaacccgaaccgtacacggtaatatcgccgtatggttcgccggcatcttctggagaagtgggcacgatgtccattcgcgcgcccatccgctgcagagcgctgatgacggcgttccgcgtcttgttcagccccacctggcgcaatgtcaggcgggaacccggacggctggcggcggccaccatccagaaggctgcggaggaaatatctgccgggactgtcaaatcatgggcgacggggagagctggcccgcaggttccgacggtaagtccatccacggtgcagggaacgccgaaatggcggaacaggcgttctgtatggtcacgggtgacggccggctggcgcacggtggtggttccgtccgcaaacatgcccgccaatagaatggcgcttttaacctgggcgctggccatgggaagcgcgtaggaaatggggtgcacccgcccgccgtgaatgctcagcggagcacagcccggtttggctccccgggcttcaatccgcgctcccatttgttccagcggctgcatgatgcggcccatggggcgggagctcagggaagcgtccccaaacatttccgaatcaaaggggcaggcggccagcatcccggccagcagcctcatgcccgtgccggaattgccgcagtcaatgggccgttcaggagccttggggctcatggcgacgcccgtaattcggaagcggacggggccgtatccctgccgttcttccagcacatccactttggcgcccagttgctccatggcgcgcagggtattcaggcaatcttcgctgcatagaaaattatccacttccgtcactccttccgccaggcctcccagaatggcggcgcggtgggaaatgcttttgtctccgggcacggtcagtgccccttgcagggaggaaatggaatgggaatgaaggttcatgagtttccggaagaactaccctgtatcggatgcagaatcaagccaattacgagacgggcggaggcatcagggggcattccagaatggagttgattttccgggacggtggcgtatattcatgtgcgttatcggctgcatccccctgaaaagaaggagagagcttttcaggatcaatggatcaagctggttttcataggtagtaagttggagcggccacgggagcagtcctgtggccgctttaccttgttcagggaagagggcgcccatggtttgaagaaggaagcggaaggaagaaagaaacaaaattctttccatgtctgctttgggctttaccgcgagccgatgaaagcgtatgtagtccatgccgatcaggttcgggtggtcgctgttccggtctccgggccggagtagaggaaagtccggacatcacaaggcagcgtgtcccgtgaaagcgggagacgggaatctcccaagggttcccggacggaaagtgccacagaaaacaaaccgcccggatggggttcgcccccatgccgggcaagggtgaaaaggggaggtaagagctcaccgctccgagggtgaccaaggaggcatggtaaaccccgcgcgatgcaagacaaacaggggaagggtcgcctgcccgccggatccccgggtattagtcgcatccgtttcgtgaaagcgaacgggcgcgcggaacgcctgaccgcggtccgcgtgagaaaaatgaccgcacagccggctctggccggcggacaaaatctggcttacagaacctggtcggctcctgcttttctaccatgccgttttcctcccctcttttcgggggaagagaaacatcttggaatttgtcccgttccgggggctctttggggttgcatgggcgttttaaatgtgtagaatccgtcacctaattgcaacccactatggagaagcttgtcgtacatggaggttttacgctgaggggagccgtcaatatcagcgggtccaaaaatgcctccctgcctattttggctgcatccctgctgacggatgagcctgtagtggtgcgccgggttccggatgtttccgataccaatttcatggtgcagatcatgggccagctgggagcctccgtggagcggtccagcggcaatgtgcgcgtggaagccaggaacctgcattccgaagccgcttatgaacaggtgcgcaagatgcgcgcctccatctgcctgatggggcccttgatggcccgcatgcagcggtgcgtgattcccctgccgggcggctgtgtgattggcgaccgtcctgtggatctgcatatcagggccatccaggcattgggggcacaggtgcagattgagcgcggcaacctgattattgaagctcccagggggttgaaaggagccacggtggatttgagcggcgaccacggccccaccgttctgggaacggacaacctgatgatggccgccgtattggcggaaggcaccaccgttattgaatccgccgcctccgagccggaagtggtggatctggcgaactttttaaccaagatgggcgccaatattcaaggtgcgggaacgcgccggatcgtcattgagggagtggaaaagctccgcggctgcaaccataccgttatcccggaccgcattgaggccggcacctttatggtggcggcggccatgatgggggatggcgtgaccctgcggcgcgtgtgtgaggaacacatgactgtggtaacggatttgctccggaagtgcggccaccacgtggaattcaacgagcggggggatacggtcaccatcattgccggaaaaacgcccaaatgcggagaaatcaagactgccccgtatcccggctaccccacggacatgcaggcccagatgacggctctcttcgccaccacgccgggcatctccgtggtgaaggatactattttcccgcagcgtttcatgcactgctccgaactcaagcgcatgggggcggacatcaaggtggacaacggcaccgccgtcatttccggggtggaaacgctcagcggcgcccccgtcatggcctccgacctgcgggcctccgccgccctggttctggcagccctgaaggcggaaggcaccacggaaatccaccgcctgtaccatattgaccggggctatgaaatgattgacgaaaaactcctggccatcggcgctgcagtggaaaggctgccggatgacgacaattaacgccgttttaggtcctgattttccttcacaccgcattttttctttactgtcagggctccatatgctattcaccgaagtcctatgaacaaggctcaactgatcgaactgattcaaagcaagctgggtgctgatacgaccaagaagcacgctgaagaagctctggccgctgtgctggaatccatcaaggaaggcgtgaaggaatccggcaaggtgcagatcattggctttggtacgtttgctaccaagacccgtgaagcccgtaccggccgcaacccgaagaccggcaacacgatcaatattcccgcctccaagacggttgctttcaaggcctcttccgccttgaaggactaagacggcaactccttcccaagggagtacttttctttcagcacccccgtcctttgaggacaggggtgttttttatgtcccggtgcggatgcacacggcttgaccgggtgaacgccgccgtctagaatgccgccatgtccagcagttttggtcaggtgttcagaatttctacctggggtgaatcccatgggaccggggtaggcgtggtgattgatggttgtccgtccctcgtcccggtgacggaagaagacattcagcgggagctggaccggcgcaggccggggcagagcgacatcgtaaccccccgcagggaggaagaccgcgcggaaatcctttccggagtgctggacggcaaaaccctgggaacgcctatcgccatcagtgtccggaacaaggaccaccgctcttccgcctatgacgagatggccagaacgtaccggccctcccacgcggactatacatacgacgctaaatacggcattcgcgcctgggcgggcgggggccgggcctccgcacgggaaaccatcggccgcgtcgcagccggagccgtagccaaggccgtgctgaagcaggcttttcccgatatggaggccgtggcctgggtggatcaggttcaccatgtgaaagcttccgtggactggggagccgtgacggcctctgccattgagagcaatatcgtccgtacggcggacccctccgctgcggaagccatgatcgctgccatcaaggaagctcgtgactccggaaactccttgggcggcgtggtcaaatgcgtggtgcgcggctgccctcccggtctgggtgatccggtctttgacaagctggacgctacgcttgcccacgccatgatgagcattcccgccaccaaggctttcgccgtgggctccggttttgaagcggcggacatgaccggtctggaacataatgaccctttttacatgcagggctgccgggtgcgtaccgccaccaaccactccggcggtattcagggcggcatctccaatggagaggacattctgatgcgcatcggcttcaagcctacggccaccttgatgattgaccagcagacggtcaacagggacggggaggatgcccggctcaagggcaggggacggcatgatgcctgcgtactgccgcgcgccgtacccattgtggaggccatggcctggctctgcctgtgcgaccactacctgcgccaacgctgccagagggctctgtaacaaccggtttcacggcttcttttccctcattcatggattcctccctcacattttacctggttctgggcgcattgctgctgggtttcatcgtactcggcatgctgaaggggatgattaaaatgctcctgttcggcgcggcagtgctctcttccgtagccgcttacttctggctatccaaatacggtttcacctacctctctttcatcaccagcgacccgcgggaatggatggtcacggtgctgtccgtcggaggcgcggcggctgtcttctttgtctttatgcacggtctcttctggttcagcgacgtcttctcctggggacggcgcatgggcttcggcggggccaagggaatcgtcacgacggtactgatggcggcagtcgtatgctgggtgggagtcatgtgcatcttcttttacggctccatggcggaaatgacccgcgcccgagaactggccctgtaccacatggaccccaaccgcaccatttccctacctgccatttattccatcaaaaagtccatcatggacaacccccacctgagctggctggaaaaaatatctccggagcatgatccggaacggctttccctggcaaaaatgatcgcctacctggtgacgctcagtccggagctctccgaccagcggcgcacccagctggactgctatatgccccgttcccgcattaccagccgcgtgctaagcctgaaaagcctgagcgaagaccccgccatccgccttctggtgcagaagggggatatgcagggcttatataatgatgtcaagctgacccgctttctggaagaccacgatgtccgttccgtcctgtcccaactggatgttgatcgtgtgctgggctttgtcacggaaattcgccggacggccccagccggaaatgaatacattcccgaagccactccaattgagtgataagcgcggattttttgttccgccggagtggattcgttccttttatccgcctttaattcaagaaaaaatcagggagttatccccccccttgcgcccgaaccggaaaaagagagttcctgcttttttcaggaaaaagcgcttcctccaggcgttcgtcccggaagaagcgctcttttgaggataaggtattgcaaaccttgaaaaaacatcaggagagtttttccgcgatggcatccacccattccgggaaggtatcatcatggtctccattggaaagcactaccggcagaagcctttgcgctttcaaacgttccaggaaggaatcgaagtccttgccagcctggcagaagttttcgtaaaattcatctccaagggcaaaaacggcgtagcttacctcggacaaatcttccgaagagtccttcaattcctgatggagtgcctctgcgttggtgggaggttctccgtccccccacgtactggtgatgaccagaagcgttcccgcattcttcaactgttccaccgttataccttccatgtcaaccacctttgcctgatggccgagcttggtcaattttgcccatgcgtcctgggccagactctccgaattgccggtttccgttccgtagataatagtgatttccatgcgttctgatgattagtttgacagcgaaagttagattaaactaattaaacaggcaaggcaaaacagcaggacgacggctgaatttttcttccttgtttatccttcagggtaactggttttccggaaaattctccgataccatactactctcgtttgattatcaaagtattcggatgctgtggaaaggtgaagcaccagccgaaaagacgcgcaaaacggtagtataatcccttgcggcaggaattctggctggtcatgatatcgtaaaaagccaggtcaatctggcttctggaaatgggggctccgttcattttggcgtgcagcatggcgtcgtggaacagggaagggaggagcatatccggaggggtggacccccaggtgacgccgtcccagccatagccgggagtaatgctgaaacgaccgccctccgcctgcatgcgtatggatgggtcatacacgctgacggctgtccagcggccaaaatccgccctttttcttccgctggtccagctgatggcgtttttagtgatgtagaaaggcttgtcttcatagagggttccttcataccagccggccacgggttccggggccgcggccggagtggagcaggattccagaaacatggctgcacatattgttgtgaacaatatgtaaatataatgtgaataagaaataaagggcatgagaggacggcgcgttatccggatagttgtttcttattggatttccagcacgatgatttccggagggcagcagaagcgcaggggaagaacgctgcatcccaaaccgcgggtaatgaggaagggggttccgttcagctgggaccagggataggaaaatttgaccttctctcgtgagatgtttgtcagggccctgcctccgggaaggcatatctgacctccgtgggtatgcgcactgatgacgaggtccgccgtgccgggagccagcaggggaaaaatgtcgggtacatgtgaaagaaggatatgcggaatatccggggaaaaacgcagaggcaattcctccggcctgattctcaggtggtagtcgtccctgacggaagagagctgcagctcacggcctccgggaaggtgcagcagcagggaatcattccacatgggcaggatgcccagcccggaaaacatgttgcgccataagttccagccgtaatactggtcatggttgccctgcacggcaaaaatgccgagaggggctttcaacatcttgaaatattcccgggccgtttccggggccatgctgctctccctcgtgtggccgttggcataatcccccagcaggaaaatcatatccggccgagcttccatgattgtttccatgtacctgtgcgccagatcgcctccgttcggacgcagatggaaatccccggcaatcgcgatacggaggggagggctttcttttctcttccactgaggcatctccatcgcagccgtgacggtttccacacgcctgggttccacctgccatgcccacatgaataaggagaagccgatcatcaatattgggacaaagataattgccaatttgttgagaaaggggcggcgtggtcgtgacttcatgcagggcagggctcctgactgattatgaggccttttaaccgattttcaatcattcgtgtttgctaatcgggaatttgctggtatgatccgtcccgctcaaggtagcggctgtccgatgactgcagctctatcttcatattaacatcctaataccatgcagtttacacacgaaatcgaacaaatgtgttgcgtcaagaaaggctgcaaccatggtccggctcctatcccgcaggaaggcaactggacgcaatccagggaaatcacggatatttccggcctgacccacggcgtgggctggtgcgctccccagcagggcacctgcaaactgacgctgaatgtcaaaaacggcatcattgaagaagcactcgtggaaaccagcggctgctccggcatgacccattccgccgccatggctgcggaaatcctgcccggcaagaccatactggaagcaatgaacacggacctcgtgtgcgacgccatcaacaccgccatgcgcgaactgttcctgcagatcgtgtacggccgcacccagagtgccttctctgaaggaggccttcccatcggcgccggtcttgaagacctcggcaaggggcttcgctcccagatcggcaccctgtacggcacccgcgccaaaggcccccgctatttggaaatggctgaaggctacattaccaagcttgccctggatgaagacggtgaaatcatcggctacgagtttgtgcgcatggggccgatgatggaaatgatcaagaagggcgtggacgccaacgaagccgtcgccaaatgcacgggcaactacggtcgtttcgacgaggcagccaagtacatcgatcctcgtcacgaatgagattgaattaaaaagagtatcttaacttcaagcactattaccattatgcctcttttcgaatcctacgaccgccgcatcaagcagatcaatgaagccctggccaaatacggcatcggctccattgaagaagcggaacaactctgcctttccaagggaatcaacccccgtgaaattgtgaacggcattcagcccatcgcgtttgaaaacgccggctgggcctatgtggtgggagccgccatcgccatcaagaagggctgcacgaaggccgccgacgccgctgaagccatcggagaaggccttcagtccttctgcattcccggctccgttgcggatgaacgcaaggtgggcctgggccacggcaacctggccgccatgctcctgcgcgatgaaacggaatgcttctgcttcctggccgggcacgaatcctttgccgccgctgaaggcgccatcggtattgccaagtccgccaaccgcgtccgcaaacaggatctccgcgtctgcctgaacggcctcggcaaggatgccgcgtacatcatctcccgcatcaacgggttcacgtacgtgcaaaccaagtttgactatgctacgggcaagctgaacatcatccaggagaaagctttctccaagggccccaaagccgccgtgcgcgtgtacggctgcgatgacgtgcgcgaaggcgtggctgtcatgtggaatgaaggcgtggatgtttccattaccgggaactccaccaaccccacccgcttccagcacccggtagccggcacctataaaaaggaatgcaatgagaagggcaagaagtacttctccgtggcttccggcggcggcacgggccgtaccctgcacccggacaacatggcggccggtcccgcttcctacggcatgactgataccatgggccgcatgcactccgacgcccagttcgccggttcttcctccgtgcccgcccatgtggaaatgatgggcctcatcggcatgggcaacaacccgatggtcggcgcttccgtagcggtggccgtggctgttgaagaagccgccaagcagaacgcctgagcgagcagctgatcaaaaaatcgcagagccgctttcccgatttgggaaagcggctcttttagcaattgaaagaaaaaaaggggatgtcccccttttcctgcccttgtatccgcatcagcttccgatacggaatcttccatcccggtccacccggggaggaagcccgcgcgaaggaacggatcttctggaaacggattcctgcctggcagaggccggcttgacggagcggatttccgggcgggaggcagaagcgggagcaaccgtttttcccggttgcgtgccgtgggaggaagggagaacaggaacggttcccacaaccgttttttgccgttcatgggccttataggcgcgttgcagggtaaaatcccgctgttctcccggtctcagggaataatccgcctttttgggagctccggctttttgcgccagaggttccacgcgccgctgcagctgagcggcggtatccagtttgccggccacccattccgggttccattccggctcggatgttttcagggactgaagcaactgctccgctttcttgccgctttccagggctgccttataatccccctccttctcctgccgtgccgcgcgcgtcagggaaaggttggcttcgtaaaaagtgtctccgggattgccaagggccgttgtagccgccaggaacatgcagagcagggaacagggtagaaacttccttttcatgattgttggcacgataacatgattcctcgttttggaaaggcctttcttccggcatgttttgcgcagggccggactccgtttcccttgcggataaaggaaaggttctccattccgcaccccggagcaacttgacggaaagtccggagtgccgtatgctggacgggacctgctatatgacccggaacgagccatcatcccttccagctccgcagatggaggaagatcccagattcctgacggaacaaattgtaacctatttgggcaataagcgttccctgcttcattttctgggaacggggctggaacaggtgaaaaaacgcctgggtaaggaaaggctgaaagcaggggaccttttttccggcagcggcattgtggcgcgttttctgaaacagcattcggaagagttgattgtcaatgatctggaggaatacagccgggtcgtcaatacctgttacctgagcaacgcggaggaagtggaaaatctggagctggacagacactacagacgcctgctgcggtatatggaaacgcatgaatcccctggcttcatcacggaactgtacgctcccagaaatccggactgcatcacggcggatgaccgcgttttctatacgcgccgcaacgccgtgtacctggatacggcgaggcagaccatcaatttgcttccggcagaagtcaggccctattttatcgctcctcttctggcggaagcttccgtccacacaaacacatccggcgtattcaaaggtttttacaaagacaggaacggaatcggcaaattcgggggaacgggaggcaacgccctttcccgcattctgggagaaatttcgctgccgtttcccgtgttttcccggtttgactgccggtattccatccattgccgtgacgccaatgaactggtttccgagctgccggaaatggatgtggtgtacctggaccctccctataaccagcatccgtacggttccaattatttcatgctgaatttgctgtcttcttatgaaaagccggaggaaaccagccgagtttccggcattcccgcagattggaaacgttccacgtacaatagccgccagcatgctccggaggccctgttccggctgctggaggattgcccggccaaatttattctgctttcctacagctcggaggggttcatcaactatgaggagatgaccggtttccttggacgcctgggccataccgttacgctggaaacgccgtacgccgcgttccggggcagccggaatttcagaaaccgtcctcagaacgtgacggaattcctgttcctggtggaacggttttaacagatgacaggaaaggcagcctccatgcaaactcatttggaacgcttcatccgttttctggccgcggagaaaggcctgagcaccgcctaccagctttccgtgagacagaccctggaggaatttgcccggtttctggaaatggataataccggccttgcccaaacgggcatcgacacgctttcggcatttctgcggcatttgcaggaccggggcatggcccgcagctccatgcgggtggaaatggtgcatctgcgtatttttctccggtggctggccggaacgggaatactggaaaaagacccttccgtatttctggaaatgccccggcaggggttgtcgcttcctcatgtgctggatcagaaaaccgtctcaaatttgcttgaaagcattgacattcaagatattcctctgggatgtagagacagagcgctcctggagatgatttacgcctgcgggatgcgtgttagtgaaataattaattgcaaattagagagttttgataaagatgaagcttttgtccgcgtgctggggaaggggaataaaacccggctggtgcccgtagggagatccgctttggatgctttgcaaatgtatttggaaaaaggaagacccaaactggtcaggacgggaacgaaaagccacatctttctgacagtacgcggccgtccgttgacgagggagcgggttcgtcaaattctccgggaacgcgccagagccgcaggactggaacagcatgttttcccgcatatcctgcgtcattccttcgccacgcatcttctggaaaacggagcggatctgcgtattattcaggagatgctgggccatgccgatatttcaaccacccagatctatacgcatttggagcagcagcggctgaactcgattcatcaccgctttcatcccagaggatagtaacgctaattcatcattcattcccataccgcgtttttttaagtcctcccaatctatcataaccatttaaatattaaaggacagagaattattctaccgaaattgtatttggcattacatatattatgcgaagtatagtttaggcagcattctcccattctcattggacggaaaacgcgctctgtcacttgacaaatatgcaggcatttcatagcttcattaaatgagtggcccttgccttgtccgtaccgttgccattttcatccttttttcatctttttcccttcttcatgccgaagatgaggaattttccgatatcatggaactggtatcggaaacggagaactgttccgccaaactggcccgtgacaaaaacgcgacggaagaacagaagaaggaagacagaaagcgcaggaaaatcggcattggagaaacggtcaccgttaccctgaactgtaaaaagccgtttctgttggagccgaaggatcaaattcaatggaaagtgattgagggaaaagagttacttgaagatggcttaaaaacagaagaaacaacagaaaaagctaaatttcggataaatccttgtgccagtaaagaacaaatccagcagtctggagggaaagtagccattgaagtggaaaccgaactgggaacggccctcccccgccctatcgaatttgacgttgtttttcctgaacatcttactgcggaacatgaaactttgggaggaattgttaaaggcgttcctgcggcagatatgggattcccccgggatggagatcctgcacatggagtttccgcacagcttctcgtttccatccatcctctggatgtctgttttaaaggaattcgtgtcattgaaaaagacaaggggtatgttggagctgccgggagtctggcgcagccccatgcagcggacagcgtttggagcgtaggtcttgacaaccgttttggattgcatgacaacataggtataaaatccggggtgaatggccatatgcaatgggatgaaattcagggttatgatgccgatggtcatcctgtctataaacattcgtatcctaatgaatttacatggaattgccttttcaggacatatgggggagatgaaaacaaagaaggaatatccgatattgccacggtttttcagaatttttatatagagagtaaaggagaaggattgttttacgccagaatccgtaaatttctggtggataccaagaagaaggatgaatgttccgttgaacggacgtctggtggcgatcatatttttaaaccctgatatataatttgacgatgaagtctataataaaatgttttctgtcttgctcatcctccgtagcgctgcttgcgaccttttcctctgttattgcattgccttcgtccgccgcttttccggcagattcgcaagaattgagactcagcagggattccgacattggagaactaaaaaaccttctcaatcagggggatttggtgaaattttatcagacagcccacacccatatggggcagcttgagtggagcgacatcagagggggagtttccccggacaagctggatcggttattgttgattgcccggattacttccgctgctcctctgtttggagagaacgaaaatacaccgtttgaacaaatgacgcaggatttcgcttcggcaggagatattcgtcttaagggaaaagttatgaaaaacctactcatcatttccaaaatcaatctcaagcaaaaatgctctgccgtgagaaagaaagaagtggggcagctttgctccacttacgcggcaacgatgctgaagatgatgaaagaagcctacattcctgatttcgagggctggaagaaagaagttatggagagaaaaacggcggtttggagcaaagagtttaacgccaggtgggagtccttcctgaaagaaagagacgagagagtggagagaaaaaagaaggaactctccataccattcgaacagagaatgcgacggcaaaaaacggaagaggaacggataagagacagggaatttggagagaaagacgctgccttcatgcaggaagccagggaaaaatggaataaacgaatgaatcttgacgtcagcctttctatgatggatggccgaaactccaaaatcaaatcattcctcaaagataagggaggatccttattgcgcattctgttggacaactaccccggcaaagccaccgaagtgtttaaatacctgaagctggcagggtatgaggaaggagaaatgatggagtttattgaccgggaaatgggaaaaaacaaggatacggagttcctgtatcaaagttccttgggaagaaagttccttaaagagaaaaaagagtaattctttataaaaagtgcaatatggattcaacagagttgtcaggaatgatttttattgttcctgtccagatgtttttctttcttcttccttttcttaagttctcagctgaataggatattctccatttgaaatgattcaggaacgaactttcggcgaaatccatgttttttaatcctgattttatgattgaccgaattttcagttttctgtcttgctcatcctccgtagcgctgcttgcgaccttttcctctgttattgcattgccttcgtccgccgcttttccaacagattcgcaagaattgaaattcaacaaggattctgacattggagaattaaaaaaacttcttcagcaaggagaactcgtaaaattttaccaaacagcccacacccatatggggcagcttgagtggagtgacatcagagggggagtttccccggacaagctggatcggttattgttgatagcccggattacttccgctgctcctctgtttggagagaacgaaaatacaccgtctgaacaaatgacgccggattttgacttaaaaaatgatatttctctcaaagggaaagttatggtagatctggttatcatttccaaaatcaatctcaagcaaaaatgctctgccgtgagaaagaaagaagtggggcagctttgctccatttacgcggcaacgatgctgaagatgatgaaagaagcctacattcctgatttcgagggctggaagaaagaagttatggagagaaaaacggcggtttggagcaaagagtttaacgccaggtgggagtccttcttgaaagaaagagacgagagagtggagagaaaaaagaaggaactctccataccattcgaacagagaatgcgacggcaaaaaacggaagaggaacggataagagacagggaatttggagagaaagacgccgccttcatgcaggaagccagggaaaaatgggacaaatgtaggaatcttgccaatatattaagtatcatggaagatcgaaactccaaaatcaaatcattcctcaaagatggaggaggaggtttattacgaattttgttggacaactaccccggcaaagccactgaagtgtttaaatacctgaagctggcgggatatgaggaaggagaaatgatggagttggttgatcgggaggagggaaaaaccgaagaaacggaatttttgtatcaaagcccgttgggaagaaagttccttaaagagaagaaacaaaagaaataattactgccagagcgcggaatcatgatatttttagtttgcaaggatattttatctttttgggattccttctctcttgccagatcacctttcatccttcataataaaaaaagcatgaatactttcgtttctctttgcctggtcgggagcctcagcctgggttccctttgttatgcgcagtacatggataacgatgccaagaagaaggtaatcaaggatttggataatttgctcgctctgaacaggtctgcagaaaccaaggtaatcaatgccgctatcagcaaactgaattccgccggcagggatcccggcgccgcatatgacctgctgattcagtccaagaagtttctgatggaaacggaaaaggagaaggacaagagccaggggaagagcgccaaaatcgcctccaattccatgaaggactggatggaccgtgaagcgaagaagtaccaggataaaaatgcccgtaaaggattaatgcttcaatatcaatggggagttctcgtcctcaaggctcgtcttaaggaaaatttaatgaacgccacctcccattccaccggaggaacagcggaggaaaccctggacgtta
